(19) United States
(12) Patent Application Publication
(10) Pub. No.: US 2021/0317402 A1
(43) Pub. Date: Oct. 14, 2021

(54) GENOME-WIDE RATIONALLY-DESIGNED MUTATIONS LEADING TO ENHANCED LYSINE PRODUCTION IN E. COLI

(71) Applicant: Inscripta, Inc., Boulder, CO (US)

(72) Inventors: Eric Abbate, Boulder, CO (US); Katherine Krouse, Boulder, CO (US); Nandini Krishnamurthy, Boulder, CO (US); Richard Fox, Boulder, CO (US); Daniel Held, Boulder, CO (US); Michael Clay, Boulder, CO (US); Krishna Yerramsetty, Boulder, CO (US)

(21) Appl. No.: 17/355,295

(22) Filed: Jun. 23, 2021

Related U.S. Application Data
(63) Continuation-in-part of application No. 17/159,137, filed on Jan. 26, 2021, now Pat. No. 11,078,458.
Application No. 17/159,137 is a continuation of application No. 16/904,827, filed on Jun. 18, 2020, now Pat. No. 10,920,189.
(60) Provisional application No. 62/865,075, filed on Jun. 21, 2019.

(51) Int. Cl. C12N 1/20; C07K 14/245

(52) U.S. Cl. CPC C12N 1/20; C12N 2511/00; C12N 2510/02; C07K 14/245

(57) ABSTRACT

The present disclosure relates to various different types of variants in E. coli coding and noncoding regions leading to enhanced lysine production for, e.g., supplements and nutraceuticals.

### RELATED APPLICATIONS

[0001] This application is a continuation-in-part of U.S. Ser. No. 17/159,137, filed 26 Jan. 2021, entitled “Genome-Wide Rationally-Designed Mutations Leading to Enhanced Lysine Production in E. coli”; which is a continuation of U.S. Ser. No. 16/904,827, filed 18 Jun. 2020, entitled “Genome-Wide Rationally-Designed Mutations Leading to Enhanced Lysine Production in E. coli”, now U.S. Pat. No. 10,920,189; both of which claim priority to U.S. Provisional Applications Nos: 62/865,075, filed 21 Jun. 2019, entitled “Genome-Wide Rationally-Designed Mutations Leading to Enhanced Lysine Production in E. coli”, incorporated by reference herein in its entirety.

### INCORPORATION BY REFERENCE

[0002] Submitted with the present application is an electronically filed sequence listing via EFS-Web as an ASCII formatted sequence listing, entitled “INSC046CIP_seqlist_20210622”, created Jun. 22, 2021, and 1,565,000 bytes in size. The sequence listing is part of the specification filed herewith and is incorporated by reference in its entirety.

### FIELD OF THE INVENTION

[0003] The present disclosure relates to mutations in genes in E. coli leading to enhanced lysine production.

### BACKGROUND OF THE INVENTION

[0004] In the following discussion certain articles and methods will be described for background and introductory purposes. Nothing contained herein is to be construed as an “admission” of prior art. Applicant expressly reserves the right to demonstrate, where appropriate, that the articles and methods referenced herein do not constitute prior art under the applicable statutory provisions.

[0005] The amino acid lysine is an α-amino acid that is used in the biosynthesis of proteins and is a metabolite of E. coli, S. cerevisiae, plants, humans and other mammals, as well as algae. Lysine contains an α-amino group, an α-carboxylic acid group, and has a chemical formula of C₆H₁₄N₂O₂ One of nine essential amino acids in humans, lysine is required for growth and tissue repair and has a role as a micronutrient, a nutraceutical, an agricultural feed supplement, an anticonvulsant, as well as a precursor for the production of peptides. Because of these roles as, e.g., a supplement and nutraceutical, there has been a growing effort to produce lysine on a large scale.

[0006] Accordingly, there is a need in the art for organisms that produce enhanced amounts of lysine where such organisms can be harnessed for large scale lysine production. The disclosed nucleic acid sequences from E. coli satisfy this need.

### SUMMARY OF THE INVENTION

[0007] This Summary is provided to introduce a selection of concepts in a simplified form that are further described below in the Detailed Description. This Summary is not intended to identify key or essential features of the claimed subject matter, nor is it intended to be used to limit the scope of the claimed subject matter. Other features, details, utilities, and advantages of the claimed subject matter will be apparent from the following written Detailed Description including those aspects illustrated in the accompanying drawings and defined in the appended claims.

[0008] The present disclosure provides variant E. coli genes and non-coding sequences that produce enhanced amounts of lysine in culture including double and triple combinations of variant sequences. Thus, in some embodiments, the present disclosure provides any one of E. coli variants comprising the sequences in SEQ ID NOs: 2-324 and combinations thereof.

[0009] These aspects and other features and advantages of the invention are described below in more detail.

### BRIEF DESCRIPTION OF THE DRAWINGS

[0010] The foregoing and other features and advantages of the present invention will be more fully understood from the following detailed description of illustrative embodiments taken in conjunction with the accompanying drawings in which:

[0011] FIGS. 1A and 1B are graphic depictions of the lysine pathway in E. coli, highlighting the enzymes in the pathway targeted for rationally-designed editing. FIG. 1B is a continuation of FIG. 1A.

[0012] FIG. 2 enumerates the biological target, edit outcome, edit type and scale for the initial 200,000 edits made to the E. coli lysine pathway.

[0013] FIG. 3A is an exemplary engine vector for creating edits in E. coli. FIG. 3B is an exemplary editing vector for creating edits in E. coli.

[0014] It should be understood that the drawings are not necessarily to scale, and that like reference numbers refer to like features.

### DETAILED DESCRIPTION

[0015] All of the functionalities described in connection with one embodiment of the methods, devices or instruments described herein are intended to be applicable to the additional embodiments of the methods, devices and instruments described herein except where expressly stated or where the feature or function is incompatible with the additional embodiments. For example, where a given feature or function is expressly described in connection with one embodiment but not expressly mentioned in connection with an alternative embodiment, it should be understood that the feature or function may be deployed, utilized, or implemented in connection with the alternative embodiment unless the feature or function is incompatible with the alternative embodiment.

[0016] The practice of the techniques described herein may employ, unless otherwise indicated, conventional techniques and descriptions molecular biology (including recombinant techniques), cell biology, biochemistry, and genetic engineering technology, which are within the skill of those who practice in the art. Such conventional techniques and descriptions can be found in standard laboratory manuals such as Green and Sambrook, Molecular Cloning: A Laboratory Manual. 4th, ed., Cold Spring Harbor Laboratory Press, Cold Spring Harbor, N.Y., (2014); Current Protocols in Molecular Biology, Ausubel, et al. eds., (2017); Neumann, et al., Electroporation and Electrofusion in Cell Biology, Plenum Press, New York, 1989; and Chang, et al., Guide to Electroporation and Electrofusion, Academic Press, California (1992), all of which are herein incorporated in their entirety by reference for all purposes.

[0017] Note that as used herein and in the appended claims, the singular forms “a,” “an,” and “the” include plural referents unless the context clearly dictates otherwise. Thus, for example, reference to “a cell” refers to one or more cells, and reference to “the system” includes reference to equivalent steps, methods and devices known to those skilled in the art, and so forth.

[0018] Unless defined otherwise, all technical and scientific terms used herein have the same meaning as commonly understood by one of ordinary skill in the art to which this invention belongs. All publications mentioned herein are incorporated by reference for the purpose of describing and disclosing devices, formulations and methodologies that may be used in connection with the presently described invention.

[0019] Where a range of values is provided, it is understood that each intervening value, between the upper and lower limit of that range and any other stated or intervening value in that stated range is encompassed within the invention. The upper and lower limits of these smaller ranges may independently be included in smaller ranges, and are also encompassed within the invention, subject to any specifically excluded limit in the stated range. Where the stated range includes one or both of the limits, ranges excluding either or both of those included limits are also included in the invention.

[0020] In the following description, numerous specific details are set forth to provide a more thorough understanding of the present invention. However, it will be apparent to one of skill in the art that the present invention may be practiced without one or more of these specific details. In other instances, features and procedures well known to those skilled in the art have not been described in order to avoid obscuring the invention. The terms used herein are intended to have the plain and ordinary meaning as understood by those of ordinary skill in the art.

[0021] The term DNA “control sequences” refers collectively to promoter sequences, polyadenylation signals, transcription termination sequences, upstream regulatory domains, origins of replication, internal ribosome entry sites, nuclear localization sequences, enhancers, and the like, which collectively provide for the replication, transcription and translation of a coding sequence in a recipient cell. Not all of these types of control sequences need to be present so long as a selected coding sequence is capable of being replicated, transcribed and-for some components-translated in an appropriate host cell.

[0022] The term “CREATE cassette” or “editing cassette” refers to a gRNA linked to a donor DNA or HA. Methods and compositions for designing and synthesizing CREATE editing cassettes are described in U.S. Pat. Nos. 10,240,167; 10,266,849; 9,982,278; 10,351,877; 10,364,442; 10,435,715; and 10,465,207; and U.S. Ser. No. 16/550,092, filed 23 Aug. 2019; Ser. No. 16/551,517, filed 26 Aug. 2019; Ser. No. 16/773,618, filed 27 Jan. 2020; and Ser. No. 16/773,712, filed 27 Jan. 2020, all of which are incorporated by reference herein in their entirety.

[0023] As used herein the term “donor DNA” or “donor nucleic acid” refers to nucleic acid that is designed to introduce a DNA sequence modification (insertion, deletion, substitution) into a locus (e.g., a target genomic DNA sequence or cellular target sequence) by homologous recombination using nucleic acid-guided nucleases. For homology-directed repair, the donor DNA must have sufficient homology to the regions flanking the “cut site” or site to be edited in the genomic target sequence. The length of the homology arm(s) will depend on, e.g., the type and size of the modification being made. In many instances and preferably, the donor DNA will have two regions of sequence homology (e.g., two homology arms) to the genomic target locus. Preferably, an “insert” region or “DNA sequence modification” region—the nucleic acid modification that one desires to be introduced into a genome target locus in a cell—will be located between two regions of homology. The DNA sequence modification may change one or more bases of the target genomic DNA sequence at one specific site or multiple specific sites. A change may include changing 1, 2, 3, 4, 5, 10, 15, 20, 25, 30, 35, 40, 50, 75, 100, 150, 200, 300, 400, or 500 or more base pairs of the genomic target sequence. A deletion or insertion may be a deletion or insertion of 1, 2, 3, 4, 5, 10, 15, 20, 25, 30, 40, 50, 75, 100, 150, 200, 300, 400, or 500 or more base pairs of the genomic target sequence.

[0024] The terms “guide nucleic acid” or “guide RNA” or “gRNA” refer to a polynucleotide comprising 1) a guide sequence capable of hybridizing to a genomic target locus, and 2) a scaffold sequence capable of interacting or complexing with a nucleic acid-guided nuclease.

[0025] “Homology” or “identity” or “similarity” refers to sequence similarity between two peptides or, more often in the context of the present disclosure, between two nucleic acid molecules. The term “homologous region” or “homology arm” refers to a region on the donor DNA with a certain degree of homology with the target genomic DNA sequence. Homology can be determined by comparing a position in each sequence which may be aligned for purposes of comparison. When a position in the compared sequence is occupied by the same base or amino acid, then the molecules are homologous at that position. A degree of homology between sequences is a function of the number of matching or homologous positions shared by the sequences.

[0026] “Operably linked” refers to an arrangement of elements where the components so described are configured so as to perform their usual function. Thus, control sequences operably linked to a coding sequence are capable of effecting the transcription, and in some cases, the translation, of a coding sequence. The control sequences need not be contiguous with the coding sequence so long as they function to direct the expression of the coding sequence. Thus, for example, intervening untranslated yet transcribed sequences can be present between a promoter sequence and the coding sequence and the promoter sequence can still be considered “operably linked” to the coding sequence. In fact, such sequences need not reside on the same contiguous DNA molecule (i.e. chromosome) and may still have interactions resulting in altered regulation.

[0027] As used herein, the terms “protein” and “polypeptide” are used interchangeably. Proteins may or may not be made up entirely of amino acids.

[0028] A “promoter” or “promoter sequence” is a DNA regulatory region capable of binding RNA polymerase and initiating transcription of a polynucleotide or polypeptide coding sequence such as messenger RNA, ribosomal RNA, small nuclear or nucleolar RNA, guide RNA, or any kind of RNA transcribed by any class of any RNA polymerase I, II or III. Promoters may be constitutive or inducible, and in some embodiments the transcription of at least one component of the nucleic acid-guided nuclease editing system is—and often at least three components of the nucleic acid-guided nuclease editing system are—under the control of an inducible promoter. A number of gene regulation control systems have been developed for the controlled expression of genes in plant, microbe, and animal cells, including mammalian cells, including the pL promoter (induced by heat inactivation of the CI857 repressor), the pPhIF promoter (induced by the addition of 2,4 diacetylphloroglucinol (DAPG)), the pBAD promoter (induced by the addition of arabinose to the cell growth medium), and the rhamnose inducible promoter (induced by the addition of rhamnose to the cell growth medium). Other systems include the tetracycline-controlled transcriptional activation system (Tet-On/Tet-Off, Clontech, Inc. (Palo Alto, Calif.); Bujard and Gossen, PNAS, 89(12): 5547-5551 (1992)), the Lac Switch Inducible system (Wyborski et al., Environ Mol Mutagen, 28(4): 447-58 (1996); DuCoeur et al., Strategies 5(3): 70-72 (1992); U.S. Pat. No. 4,833,080), the ecdysone-inducible gene expression system (No et al., PNAS, 93(8): 3346-3351 (1996)), the cumate gene-switch system (Mullick et al., BMC Biotechnology, 6: 43 (2006)), and the tamoxifen-inducible gene expression (Zhang et al., Nucleic Acids Research, 24: 543-548 (1996)) as well as others.

[0029] As used herein the term “selectable marker” refers to a gene introduced into a cell, which confers a trait suitable for artificial selection. General use selectable markers are well-known to those of ordinary skill in the art. Drug selectable markers such as ampicillin/carbenicillin, kanamycin, nourseothricin N-acetyl transferase, chloramphenicol, erythromycin, tetracycline, gentamicin, bleomycin, streptomycin, rifampicin, puromycin, hygromycin, blasticidin, and G418 may be employed. In other embodiments, selectable markers include, but are not limited to sugars such as rhamnose. “Selective medium” as used herein refers to cell growth medium to which has been added a chemical compound or biological moiety that selects for or against selectable markers.

[0030] The term “specifically binds” as used herein includes an interaction between two molecules, e.g., an engineered peptide antigen and a binding target, with a binding affinity represented by a dissociation constant of about 10⁻⁷ M, about 10⁻⁸ M, about 10⁻⁹ M, about 10⁻¹⁰ M, about 10⁻¹¹M, about 10⁻¹²M, about 10⁻¹³M, about 10⁻¹⁴M or about 10⁻¹⁵M.

[0031] The terms “target genomic DNA sequence”, “cellular target sequence”, or “genomic target locus” refer to any locus in vitro or in vivo, or in a nucleic acid (e.g., genome) of a cell or population of cells, in which a change of at least one nucleotide is desired using a nucleic acid-guided nuclease editing system. The cellular target sequence can be a genomic locus or extrachromosomal locus.

[0032] The term “variant” may refer to a polypeptide or polynucleotide that differs from a reference polypeptide or polynucleotide but retains essential properties. A typical variant of a polypeptide differs in amino acid sequence from another reference polypeptide. Generally, differences are limited so that the sequences of the reference polypeptide and the variant are closely similar overall and, in many regions, identical. A variant and reference polypeptide may differ in amino acid sequence by one or more modifications (e.g., substitutions, additions, and/or deletions). A variant of a polypeptide may be a conservatively modified variant. A substituted or inserted amino acid residue may or may not be one encoded by the genetic code (e.g., a non-natural amino acid). A variant of a polypeptide may be naturally occurring, such as an allelic variant, or it may be a variant that is not known to occur naturally.

[0033] A “vector” is any of a variety of nucleic acids that comprise a desired sequence or sequences to be delivered to and/or expressed in a cell. Vectors are typically composed of DNA, although RNA vectors are also available. Vectors include, but are not limited to, plasmids, fosmids, phagemids, virus genomes, synthetic chromosomes, and the like. As used herein, the phrase “engine vector” comprises a coding sequence for a nuclease to be used in the nucleic acid-guided nuclease systems and methods of the present disclosure. The engine vector also comprises in E. coli, the λ Red recombineering system or an equivalent thereto which repairs the double-stranded breaks resulting from the cut by the nuclease. Engine vectors also typically comprise a selectable marker. As used herein the phrase “editing vector” comprises a donor nucleic acid, optionally including an alteration to the cellular target sequence that prevents nuclease binding at a PAM or spacer in the cellular target sequence after editing has taken place, and a coding sequence for a gRNA. The editing vector may also and preferably does comprise a selectable marker and/or a barcode. In some embodiments, the engine vector and editing vector may be combined; that is, all editing and selection components may be found on a single vector. Further, the engine and editing vectors comprise control sequences operably linked to, e.g., the nuclease coding sequence, recombineering system coding sequences (if present), donor nucleic acid, guide nucleic acid(s), and selectable marker(s).

### Library Design Strategy and Nuclease-Directed Genome Editing

[0034] Lysine is naturally synthesized in E. coli along the diaminopimelate (DAP) biosynthetic pathway. See, e.g., FIG. 1. Strain engineering strategies for increasing lysine production in E. coli and other industrially-relevant production hosts such as Corynebacterium glutamicum have historically focused on the genes in the DAP pathway as obvious targets for mutagenesis and over-expression. Beyond this short list of genes encoding the lysine biosynthetic enzymes, it is likely that additional loci throughout the E. coli genome may also contribute appreciably (if less directly) to improved lysine yields in an industrial production setting. For this reason, targeted mutagenesis strategies which enable a broader query of the entire genome are also of significant value to the lysine metabolic engineer.

[0035] The variants presented in this disclosure are the result of nucleic acid-guided nuclease editing of 200,000 unique and precise designs at specified loci around the genome in a wildtype strain of E. coli harboring an engine plasmid such as that shown in FIG. 3A (such transformed MG1655 strain is referred to herein as E. coli strain EC83) and using the resulting lysine production levels to conduct additional nucleic acid-guided nuclease editing in two engineered strains of MG1655 to produce double- and triple-variant engineered strains. The first engineered strain is strain MG1655 with a single mutation comprising dapA E84T (SEQ ID NO: 1), the lysine production for which was approximately 500-fold over wildtype lysine production in MG1655. The second engineered strain is strain MG1655 with a double mutation comprising dapA E84T (SEQ ID NO: 1) and dapA J23100 (a mutation in the E. coli dapA promoter, SEQ ID NO. 2), the lysine production for which was approximately 10,000-fold over wildtype lysine production. See, e.g., FIG. 2 for a summary of the types of edits included in the 200,000 editing vectors used to generate the variants. The engine plasmid comprises a coding sequence for the MAD7 nuclease under the control of the inducible pL promoter, the λ Red operon recombineering system under the control of the inducible pBAD promoter (inducible by the addition of arabinose in the cell growth medium), the c1857 gene under the control of a constitutive promoter, as well as a selection marker and an origin of replication. As described above, the λ Red recombineering system repairs the double-stranded breaks resulting from the cut by the MAD7 nuclease. The c1857 gene at 30° C. actively represses the pL promoter (which drives the expression of the MAD7 nuclease and the editing or CREATE cassette on the editing cassette such as the exemplary editing vector shown in FIG. 3B); however, at 42° C., the c1857 repressor gene unfolds or degrades, and in this state the c1857 repressor protein can no longer repress the pL promoter leading to active transcription of the coding sequence for the MAD7 nuclease and the editing (e.g., CREATE) cassette.

[0036] FIG. 3B depicts an exemplary editing plasmid comprising the editing (e.g, CREATE) cassette (crRNA, spacer and HA) driven by a pL promoter, a selection marker, and an origin of replication.

[0037] Mutagenesis libraries specifically targeting the genes in the DAP pathway—along with a number of genes whose enzymes convert products feeding into the DAP pathway—were designed for saturation mutagenesis. Additionally, to more deeply explore the rest of the genome for new targets involved in lysine biosynthesis, libraries were designed to target all annotated loci with either premature stop codons (for a knock-out phenotype) or insertion of a set of five synthetic promoter variants (for expression modulation phenotypes).

[0038] The 200,000 nucleic acid mutations or edits described herein were generated using MAD7, along with a gRNA and donor DNA. A nucleic acid-guided nuclease such as MAD7 is complexed with an appropriate synthetic guide nucleic acid in a cell and can cut the genome of the cell at a desired location. The guide nucleic acid helps the nucleic acid-guided nuclease recognize and cut the DNA at a specific target sequence. By manipulating the nucleotide sequence of the guide nucleic acid, the nucleic acid-guided nuclease may be programmed to target any DNA sequence for cleavage as long as an appropriate protospacer adjacent motif (PAM) is nearby. In certain aspects, the nucleic acid-guided nuclease editing system may use two separate guide nucleic acid molecules that combine to function as a guide nucleic acid, e.g., a CRISPR RNA (crRNA) and trans-activating CRISPR RNA (tracrRNA). In other aspects, the guide nucleic acid may be a single guide nucleic acid that includes both the crRNA and tracrRNA sequences.

[0039] Again, the resulting lysine production levels from the single variants were used to conduct additional nucleic acid-guided nuclease editing in two engineered strains of MG1655 to produce double- and triple-variant engineered strains. The first engineered strain is strain MG1655 with a single mutation comprising dapA E84T (SEQ ID NO: 1), the lysine production for which was approximately 500-fold over wildtype lysine production in MG1655. The second engineered strain is strain MG1655 with a double mutation comprising dapA E84T (SEQ ID NO: 1) and dapA J23100 (a mutation in the E. coli dapA promoter, SEQ ID NO. 2), the lysine production for which was approximately 10,000-fold over wildtype lysine production.

[0040] A guide nucleic acid comprises a guide sequence, where the guide sequence is a polynucleotide sequence having sufficient complementarity with a target sequence to hybridize with the target sequence and direct sequence-specific binding of a complexed nucleic acid-guided nuclease to the target sequence. The degree of complementarity between a guide sequence and the corresponding target sequence, when optimally aligned using a suitable alignment algorithm, is about or more than about 50%, 60%, 75%, 80%, 85%, 90%, 95%, 97.5%, 99%, or more. Optimal alignment may be determined with the use of any suitable algorithm for aligning sequences. In some embodiments, a guide sequence is about or more than about 10, 11, 12, 13, 14, 15, 16, 17, 18, 19, 20, 21, 22, 23, 24, 25, 26, 27, 28, 29, 30, 35, 40, 45, 50, 75, or more nucleotides in length. In some embodiments, a guide sequence is less than about 75, 50, 45, 40, 35, 30, 25, 20 nucleotides in length. Preferably the guide sequence is 10-30 or 15-20 nucleotides long, or 15, 16, 17, 18, 19, or 20 nucleotides in length.

[0041] In the methods to generate the 200,000 member library, the guide nucleic acids were provided as a sequence to be expressed from a plasmid or vector comprising both the guide sequence and the scaffold sequence as a single transcript under the control of an inducible promoter. The guide nucleic acids are engineered to target a desired target sequence by altering the guide sequence so that the guide sequence is complementary to a desired target sequence, thereby allowing hybridization between the guide sequence and the target sequence. In general, to generate an edit in the target sequence, the gRNA/nuclease complex binds to a target sequence as determined by the guide RNA, and the nuclease recognizes a protospacer adjacent motif (PAM) sequence adjacent to the target sequence. The target sequences for the genome-wide mutagenesis here encompassed 200,000 unique and precise designs at specified loci around the genome throughout the E. coli genome.

[0042] The guide nucleic acid may be and in the processes generating the variants reported herein were part of an editing cassette that also encoded the donor nucleic acid. The target sequences are associated with a proto-spacer mutation (PAM), which is a short nucleotide sequence recognized by the gRNA/nuclease complex. The precise preferred PAM sequence and length requirements for different nucleic acid-guided nucleases vary; however, PAMs typically are 2-7 base-pair sequences adjacent or in proximity to the target sequence and, depending on the nuclease, can be 5′ or 3′ to the target sequence.

[0043] In certain embodiments, the genome editing of a cellular target sequence both introduces the desired DNA change to the cellular target sequence and removes, mutates, or renders inactive a proto-spacer mutation (PAM) region in the cellular target sequence. Rendering the PAM at the cellular target sequence inactive precludes additional editing of the cell genome at that cellular target sequence, e.g., upon subsequent exposure to a nucleic acid-guided nuclease complexed with a synthetic guide nucleic acid in later rounds of editing. Thus, cells having the desired cellular target sequence edit and an altered PAM can be selected for by using a nucleic acid-guided nuclease complexed with a synthetic guide nucleic acid complementary to the cellular target sequence. Cells that did not undergo the first editing event will be cut rendering a double-stranded DNA break, and thus will not continue to be viable. The cells containing the desired cellular target sequence edit and PAM alteration will not be cut, as these edited cells no longer contain the necessary PAM site and will continue to grow and propagate.

[0044] As for the nuclease component of the nucleic acid-guided nuclease editing system, a polynucleotide sequence encoding the nucleic acid-guided nuclease can be codon optimized for expression in particular cell types, such as archaeal, prokaryotic or eukaryotic cells. The choice of nucleic acid-guided nuclease to be employed depends on many factors, such as what type of edit is to be made in the target sequence and whether an appropriate PAM is located close to the desired target sequence. Nucleases of use in the methods described herein include but are not limited to Cas 9, Cas 12/CpfI, MAD2, or MAD7 or other MADzymes. As with the guide nucleic acid, the nuclease is encoded by a DNA sequence on a vector (e.g., the engine vector—see FIG. 3A) and be under the control of an inducible promoter. In some embodiments—such as in the methods described herein—the inducible promoter may be separate from but the same as the inducible promoter controlling transcription of the guide nucleic acid; that is, a separate inducible promoter drives the transcription of the nuclease and guide nucleic acid sequences but the two inducible promoters may be the same type of inducible promoter (e.g., both are pL promoters). Alternatively, the inducible promoter controlling expression of the nuclease may be different from the inducible promoter controlling transcription of the guide nucleic acid; that is, e.g., the nuclease may be under the control of the pBAD inducible promoter, and the guide nucleic acid may be under the control of the pL inducible promoter.

[0045] Another component of the nucleic acid-guided nuclease system is the donor nucleic acid comprising homology to the cellular target sequence. In some embodiments, the donor nucleic acid is on the same polynucleotide (e.g., editing vector or editing cassette) as the guide nucleic acid. The donor nucleic acid is designed to serve as a template for homologous recombination with a cellular target sequence nicked or cleaved by the nucleic acid-guided nuclease as a part of the gRNA/nuclease complex. A donor nucleic acid polynucleotide may be of any suitable length, such as about or more than about 20, 25, 50, 75, 100, 150, 200, 500, or 1000 nucleotides in length. In certain preferred aspects, the donor nucleic acid can be provided as an oligonucleotide of between 20-300 nucleotides, more preferably between 50-250 nucleotides. The donor nucleic acid comprises a region that is complementary to a portion of the cellular target sequence (e.g., a homology arm). When optimally aligned, the donor nucleic acid overlaps with (is complementary to) the cellular target sequence by, e.g., about 20, 25, 30, 35, 40, 50, 60, 70, 80, 90 or more nucleotides. In many embodiments, the donor nucleic acid comprises two homology arms (regions complementary to the cellular target sequence) flanking the mutation or difference between the donor nucleic acid and the cellular target sequence. The donor nucleic acid comprises at least one mutation or alteration compared to the cellular target sequence, such as an insertion, deletion, modification, or any combination thereof compared to the cellular target sequence. Various types of edits were introduced herein, including site-directed mutagenesis, saturation mutagenesis, promoter swaps and ladders, knock-in and knock-out edits, SNP or short tandem repeat swaps, and start/stop codon exchanges.

[0046] In addition to the donor nucleic acid, an editing cassette may comprise one or more primer sites. The primer sites can be used to amplify the editing cassette by using oligonucleotide primers; for example, if the primer sites flank one or more of the other components of the editing cassette. In addition, the editing cassette may comprise a barcode. A barcode is a unique DNA sequence that corresponds to the donor DNA sequence such that the barcode can identify the edit made to the corresponding cellular target sequence. The barcode typically comprises four or more nucleotides. In some embodiments, the editing cassettes comprise a collection or library gRNAs and of donor nucleic acids representing, e.g., gene-wide or genome-wide libraries of gRNAs and donor nucleic acids. The library of editing cassettes is cloned into vector backbones where, e.g., each different donor nucleic acid is associated with a different barcode.

[0047] Variants of interest include those listed in Table 1 below:

TABLE 1
Variants

| | Phenotype | Phenotype |
|---|---|---|
| Mutant | FOWT | FIOPC |
| Single edit: dapA E84T | 500 | 0 |
| Single edit: dapA J21300 | 1000 | 2 |
| Triple edit: dapA E84T; dapA J21300; lysC V339P | 13.500 | 27 |
| Triple edit: dapA E84T; dapA; garD J23101 | 13.000 | 26 |
| Triple edit: dapA E84T; dapA; yicL J23100 | 13.400 | 26.8 |
| Triple edit: dapA E84T; dapA; lysP R15*** | 14.600 | 29.2 |
| Triple edit: dapA E84T; dapA; mgsA J23100 | 13.300 | 26.6 |
| Triple edit: dapA E84T; dapA; pckE100Q | 13.400 | 26.8 |
| Double edit: dapA J21300; amyA J23100 | 804.620 | 1.609 |
| Double edit: dapA J21300; amyA P15*** | 784.779 | 1.570 |
| Double edit: dapA J21300; cysN L5*** | 1320.758 | 2.642 |
| Double edit: dapA J21300; dosP J23100 | 1067.701 | 2.135 |
| Double edit: dapA J21300; emrE J23100 | 1016.806 | 2.034 |
| Double edit: dapA J21300; focB J23100 | 913.339 | 1.827 |
| Double edit: dapA J21300; glnD J23100 | 1397.503 | 2.795 |
| Double edit: dapA J21300; glnE V15*** | 1085.446 | 2.171 |
| Double edit: dapA J21300; hicB J23100 | 758.057 | 1.516 |
| Double edit: dapA J21300; maeB J23100 | 946.484 | 1.893 |
| Double edit: dapA J21300; marA Y107D | 798.469 | 1.597 |
| Double edit: dapA J21300; metL R241E | 726.648 | 1.453 |
| Double edit: dapA J21300; mfd Y5*** | 983.267 | 1.967 |
| Double edit: dapA J21300; nupX R5*** | 884.027 | 1.768 |
| Double edit: dapA J21300; pck H232G | 1409.458 | 2.819 |
| Double edit: dapA J21300; phoB J23100 | 781.383 | 1.563 |
| Double edit: dapA J21300; purM J23100 | 1633.414 | 3.267 |
| Double edit: dapA J21300; rlmL F5*** | 834.477 | 1.669 |
| Double edit: dapA J21300; wzxB K5*** | 793.985 | 1.588 |
| Double edit: dapA J21300; ydgl J23100 | 1554.101 | 3.108 |
| Double edit: dapA J21300; ydjE J23100 | 778.514 | 1.557 |
| Double edit: dapA J21300; yicL J23100 | 854.283 | 1.709 |
| Double edit: dapA J21300; yliE J23100 | 979.740 | 1.959 |
| Double edit: dapA J21300; yohF J23100 | 858.181 | 1.716 |
| Double edit: dapA J21300; ytfP N15*** | 781.981 | 1.564 |
| Double edit: dapA J21300; marA R94* | 728.433 | 1.457 |
| Double edit: dapA J21300; marA Y107K | 733.943 | 1.468 |
| Double edit: dapA J21300; metL P240D | 726.648 | 1.453 |
| Double edit: dapA J21300; metL V235C | 708.124 | 1.416 |
| Double edit: dapA J21300; pck G64D | 718.020 | 1.436 |
| Double edit: dapA J21300; setB J23100 | 727.174 | 1.454 |
| Double edit: dapA J21300; ydfO J23100 | 701.255 | 1.403 |
| Double edit: dapA J21300; ydgD J23100 | 716.198 | 1.432 |
| Double edit: dapA J21300; yejG J23100 | 731.562 | 1.463 |
| Triple edit: dapA E84T; dapA J23100; metL R241E | #N/A | #N/A |
| Triple edit: dapA E84T; dapA J23100; glnE V15*** | #N/A | #N/A |
| Triple edit: dapA E84T; dapA J23100; glnD J23100 | #N/A | #N/A |
| Triple edit: dapA E84T; dapA J23100; ytfP N15*** | #N/A | #N/A |
| Quadruple edit: dapA E84T; dapA J23100; | #N/A | #N/A |
| purM J23100; dosP J23100 | | |
| Quadruple edit: dapA E84T; dapA J23100; | #N/A | #N/A |
| purM J23100; glnD J23100 | | |
| Quadruple edit: dapA E84T; dapA J23100; | #N/A | #N/A |
| pck A532S; glnD J23100 | | |
| Triple edit: dapA E84T; pck A532S; metL R241E | #N/A | #N/A |
| Triple edit: dapA E84T; pck A532S; lysC V339P | #N/A | #N/A |
| Triple edit: dapA E84T; pck A532S; glnE V15*** | #N/A | #N/A |
| Triple edit: dapA E84T; pck A532S; glnD J23100 | #N/A | #N/A |
| Double edit: dapA E84T; azoR J23100 | #N/A | #N/A |
| Double edit: dapA E84T; cra ESA | #N/A | #N/A |
| Double edit: dapA E84T; cra I6S | #N/A | #N/A |
| Double edit: dapA E84T; cra S18L | #N/A | #N/A |
| Double edit: dapA E84T; dtpA J23100 | #N/A | #N/A |
| Double edit: dapA E84T; fnr R213A | #N/A | #N/A |
| Double edit: dapA E84T; ftsY J23100 | #N/A | #N/A |
| Double edit: dapA E84T; glnD J23100 | #N/A | #N/A |
| Double edit: dapA E84T; gpp J23100 | #N/A | #N/A |
| Double edit: dapA E84T; lysC V339N | #N/A | #N/A |
| Double edit: dapA E84T; lysC V339P | #N/A | #N/A |
| Double edit: dapA E84T; marA K106D | #N/A | #N/A |
| Double edit: dapA E84T; marA Y107M | #N/A | #N/A |
| Double edit: dapA E84T; marA K106D | #N/A | #N/A |
| Double edit: dapA E84T; marA M109Q | #N/A | #N/A |
| Double edit: dapA E84T; metL A50N | #N/A | #N/A |
| Double edit: dapA E84T; metL R207C | #N/A | #N/A |
| Double edit: dapA E84T; metL S230V | #N/A | #N/A |
| Double edit: dapA E84T; metL W2291I | #N/A | #N/A |
| Double edit: dapA E84T; mgsA JS23100 | #N/A | #N/A |
| Double edit: dapA E84T; moaC M15*** | #N/A | #N/A |
| Double edit: dapA E84T; oppD Q15*** | #N/A | #N/A |
| Double edit: dapA E84T; rob K93P | #N/A | #N/A |
| Double edit: dapA E84T; ycgI J23100 | #N/A | #N/A |
| Double edit: dapA E84T; yeeP J23100 | #N/A | #N/A |
| Double edit: dapA E84T; yihN J23100 | #N/A | #N/A |
| Double edit: dapA E84T; yohO K5*** | #N/A | #N/A |
| Single edit: metF S15*** | #N/A | #N/A |
| Single edit: glgB A15*** | #N/A | #N/A |
| Single edit: yibL E5*** | #N/A | #N/A |
| Single edit: ppc R880W | #N/A | #N/A |
| Single edit: metE H641N | #N/A | #N/A |
| Single edit: metE C726H | #N/A | #N/A |
| Single edit: rffG V216D | #N/A | #N/A |
| Single edit: scpB G65N | #N/A | #N/A |
| Single edit: lysA H373Y | #N/A | #N/A |
| Single edit: lysA N58I | #N/A | #N/A |
| Single edit: lysC L377R | #N/A | #N/A |
| Single edit: tktB E1915 | #N/A | #N/A |
| Single edit: tktB K342S | #N/A | #N/A |
| Single edit: tktB Q341K | #N/A | #N/A |
| Single edit: lysC T343I | #N/A | #N/A |
| Single edit: tktB F283F | #N/A | #N/A |
| Single edit: lysA M2318K | #N/A | #N/A |
| Single edit: tktB I102W | #N/A | #N/A |
| Single edit: dapA G76Y | #N/A | #N/A |
| Single edit: pck E239Y | #N/A | #N/A |
| Single edit: pck G208Q | #N/A | #N/A |
| Single edit: pck K106W | #N/A | #N/A |
| Single edit: pck S234C | #N/A | #N/A |
| Single edit: pck T176E | #N/A | #N/A |
| Single edit: pck N177C | #N/A | #N/A |
| Single edit: pck T499Y | #N/A | #N/A |
| Single edit: pck V55Q | #N/A | #N/A |
| Single edit: dapA L88A | #N/A | #N/A |
| Single edit: pck V48C | #N/A | #N/A |
| Single edit: pck V371H | #N/A | #N/A |
| Single edit: selA I15*** | #N/A | #N/A |
| Single edit: xylH T15*** | #N/A | #N/A |
| Single edit: allC W15*** | #N/A | #N/A |
| Single edit: metB Q5*** | #N/A | #N/A |
| Single edit: metB N15*** | #N/A | #N/A |
| Single edit: metL J23100 | #N/A | #N/A |
| Single edit: nirB J23100 | #N/A | #N/A |
| Single edit: yrhC J23100 | #N/A | #N/A |
| Single edit: prlC J23100 | #N/A | #N/A |
| Single edit: argK J23100 | #N/A | #N/A |
| Single edit: glgP J23100 | #N/A | #N/A |
| Single edit: argA J23100 | #N/A | #N/A |
| Single edit: tmpR J23112 | #N/A | #N/A |
| Single edit: ugpQ J23112 | #N/A | #N/A |
| Single edit: bscF J23112 | #N/A | #N/A |
| Single edit: lafU J23112 | #N/A | #N/A |
| Single edit: prfH J23112 | #N/A | #N/A |
| Single edit: csiR J23106 | #N/A | #N/A |
| Single edit: feoA J23106 | #N/A | #N/A |
| Single edit: glgP J23106 | #N/A | #N/A |
| Single edit: dapA H56M | #N/A | #N/A |
| Single edit: dapA A79E | #N/A | #N/A |
| Single edit: dapA H56K | #N/A | #N/A |
| Single edit: dapA N80H | #N/A | #N/A |
| Single edit: dapA A79H | #N/A | #N/A |
| Single edit: dapA A79V | #N/A | #N/A |
| Single edit: dapA H56T | #N/A | #N/A |
| Single edit: dapA A79L | #N/A | #N/A |
| Single edit: dapF L45E | #N/A | #N/A |
| Single edit: pck M231L | #N/A | #N/A |
| Single edit: pck G107V | #N/A | #N/A |
| Single edit: dapA H56E | #N/A | #N/A |
| Single edit: dapA N80Q | #N/A | #N/A |
| Single edit: dapA A79N | #N/A | #N/A |
| Single edit: pck H232L | #N/A | #N/A |
| Single edit: dapA A79Y | #N/A | #N/A |
| Single edit: dapA H56Y | #N/A | #N/A |
| Single edit: dapA L88S | #N/A | #N/A |
| Single edit: dapA E84N | #N/A | #N/A |
| Single edit: lysA G148A | #N/A | #N/A |
| Single edit: lysP R15*** | #N/A | #N/A |
| Single edit: dapF N190I | #N/A | #N/A |
| Double edit: dapA A79H; dapA D65S | #N/A | #N/A |
| Single edit: lysC V339A | #N/A | #N/A |
| Single edit: yfcO J23112 | #N/A | #N/A |
| Single edit: aroE K15*** | #N/A | #N/A |
| Single edit: metL A772R | #N/A | #N/A |
| Single edit: metL D508H | #N/A | #N/A |
| Single edit: yijF J23101 | #N/A | #N/A |
| Single edit: dapA A81Q | #N/A | #N/A |
| Single edit: garD Q274D | #N/A | #N/A |
| Single edit: dapA L88D | #N/A | #N/A |
| Single edit: garD J23101 | #N/A | #N/A |
| Single edit: lysC V339D | #N/A | #N/A |
| Single edit: dapF L46N | #N/A | #N/A |
| Single edit: ribE J23101 | #N/A | #N/A |
| Single edit: lysC S338K | #N/A | #N/A |
| Single edit: argE L5*** | #N/A | #N/A |
| Single edit: acrD J23106 | #N/A | #N/A |
| Single edit: dapA L88F | #N/A | #N/A |
| Single edit: dapA Y106H | #N/A | #N/A |
| Single edit: yidR V5*** | #N/A | #N/A |
| Single edit: yicL R5*** | #N/A | #N/A |
| Single edit: dapA N80A | #N/A | #N/A |
| Single edit: hupA Q5*** | #N/A | #N/A |
| Single edit: yhjR G15*** | #N/A | #N/A |
| Single edit: yhdJ C5*** | #N/A | #N/A |
| Single edit: adeQ T15*** | #N/A | #N/A |
| Single edit: dppF A15*** | #N/A | #N/A |
| Single edit: dapA A81V | #N/A | #N/A |
| Single edit: dapA A57M | #N/A | #N/A |
| Single edit: yidG D3*** | #N/A | #N/A |
| Single edit: pck K106I | #N/A | #N/A |
| Single edit: metL P766F | #N/A | #N/A |
| Triple edit: dapA E84T; dapA J23100; thrA G502P | ctrl not run | 18.99929877 |
| Double edit: dapA E84T; thrA K682G | ctrl not run | 13.97383116 |
| Double edit: dapA E84T; thrA G634I | ctrl not run | 17.45976727 |
| Double edit: dapA E84T; thrA Q487D | ctrl not run | 11.08323335 |
| Double edit: dapA E84T; thrA A808L | ctrl not run | 6.250993725 |
| Double edit: dapA E84T; thrA G502P | ctrl not run | 3.112729503 |
| Single edit: thrA V609N | 745.1695991 | 2.771991579 |
| Single edit: thrA G477E | 779.8274067 | 2.900916794 |
| Single edit: thrA F603K | 514.3469754 | 1.913343601 |
| Single edit: thrA L480R | 387.0459064 | 1.439790344 |
| Single edit: thrA G474L | 422.3582282 | 1.571150317 |
| Single edit: thrA I685W | 721.3030528 | 2.683209286 |
| Single edit: thrA S637W | 70.21122624 | 0.261182056 |
| Single edit: thrA G626E | 1.553737174 | 0.00577982 |
| Single edit: thrA A777* | 1815.768654 | 3.485792728 |
| Single edit: thrA G626* | 1237.618292 | 2.37589785 |
| Single edit: thrA A581* | 1029.134432 | 1.975664306 |
| Single edit: thrA L683* | 964.9281563 | 1.85240534 |
| Single edit: thrA M677* | 934.2252013 | 1.793463835 |
| Single edit: thrA R671* | 837.8471306 | 1.60844358 |
| Single edit: thrA M586* | 732.9563684 | 1.407081223 |
| Single edit: thrA R744* | 553.2479145 | 1.062088803 |
| Single edit: thrA G638* | 550.9389894 | 1.057656281 |
| Single edit: thrA A680* | 461.2140829 | 0.885408333 |
| Single edit: thrA D648* | 371.8330972 | 0.71382062 |
| Single edit: thrA G753* | 266.0877148 | 0.510817619 |
| Single edit: thrA R681* | 180.5327173 | 0.346574786 |
| Single edit: thrA T657* | 89.27068609 | 0.171375967 |
| Single edit: thrA N748* | 64.55536945 | 0.123929134 |
| Single edit: thrA E751* | 55.37857537 | 0.106312131 |
| Single edit: thrA L684* | 2658.955682 | 5.104487491 |
| Single edit: thrA Y594* | 1575.993498 | 3.025488222 |
| Single edit: thrA I685* | 853.7995042 | 1.639067893 |
| Single edit: thrA Y589* | 786.9336594 | 1.510703261 |
| Single edit: thrA A760* | 681.7040503 | 1.308690408 |
| Single edit: thrA A656* | 293.5982728 | 0.563630572 |
| Single edit: thrA A595* | 286.6741841 | 0.550338163 |
| Single edit: thrA G664* | 254.875342 | 0.489292847 |
| Single edit: thrA T462* | 180.2573323 | 0.34604612 |
| Single edit: thrA A504* | 174.7122904 | 0.335401115 |
| Single edit: thrA L647* | 169.2426762 | 0.324900911 |
| Single edit: thrA I749* | 99.18725116 | 0.190413133 |
| Single edit: thrA L705* | 77.78676866 | 0.149329901 |
| Single edit: thrA L509* | 76.79502692 | 0.14742602 |
| Single edit: thrA F709* | 69.92103191 | 0.134229779 |
| Single edit: thrA Y642* | 54.87541602 | 0.105346199 |
| Single edit: thrA A559* | 2136.092315 | 4.100728934 |
| Single edit: thrA L674* | 1550.26902 | 2.976104067 |
| Single edit: thrA K580* | 1236.218222 | 2.373210088 |
| Single edit: thrA I635* | 1047.047284 | 2.010052217 |
| Single edit: thrA L686* | 1028.752267 | 1.974930652 |
| Single edit: thrA A625* | 764.2834504 | 1.467220886 |
| Single edit: thrA I759* | 759.4420248 | 1.457926637 |
| Single edit: thrA A479* | 587.7473447 | 1.128318531 |
| Single edit: thrA R593* | 447.4978962 | 0.859076903 |
| Single edit: thrA S489* | 353.1816389 | 0.678014782 |
| Single edit: thrA D566* | 184.0427987 | 0.353313209 |
| Single edit: thrA R661* | 136.4260058 | 0.261901635 |
| Single edit: thrA S556* | 2189.975432 | 4.204170184 |
| Single edit: thrA G571* | 2097.776237 | 4.027172259 |
| Single edit: thrA D809* | 1863.335412 | 3.577108249 |
| Single edit: thrA V476* | 1722.412304 | 3.306573374 |
| Single edit: thrA V574* | 1392.404904 | 2.673046965 |
| Single edit: thrA L498* | 1105.050946 | 2.121403817 |
| Single edit: thrA Q558* | 1098.067217 | 2.107996913 |
| Single edit: thrA C755* | 1090.565886 | 2.093596354 |
| Single edit: thrA L694* | 1066.027748 | 2.046489659 |
| Single edit: thrA S639* | 1055.546258 | 2.026367986 |
| Single edit: thrA L768* | 995.1955988 | 1.910510777 |
| Single edit: thrA Y588* | 560.4054121 | 1.075829295 |
| Single edit: thrA L547* | 196.996464 | 0.3781808 |
| Single edit: thrA G747* | 159.9947036 | 0.307147264 |
| Single edit: thrA M663* | 118.5982709 | 0.227677127 |
| Single edit: thrA V746* | 98.59469946 | 0.189275592 |
| Single edit: thrA A731* | 72.0219076 | 0.138262901 |
| Single edit: thrA A730* | 53.84365984 | 0.103365502 |
| Single edit: thrA Y564* | 3996.418056 | 7.672059414 |
| Single edit: thrA L811* | 3423.472324 | 6.572156043 |
| Single edit: thrA R812* | 3239.998968 | 6.219936012 |
| Single edit: thrA V754* | 2404.54608 | 4.616088741 |
| Single edit: thrA G634* | 1838.512499 | 3.529454859 |
| Single edit: thrA Q487* | 1602.328936 | 3.076045256 |
| Single edit: thrA L480* | 719.5845179 | 1.381410828 |
| Single edit: thrA S637* | 663.1462888 | 1.273064444 |
| Single edit: thrA A565* | 304.4601917 | 0.584482566 |
| Single edit: thrA V500* | 293.8620349 | 0.564136925 |
| Single edit: thrA K598* | 121.9341716 | 0.234081169 |
| Single edit: thrA K507* | 105.2864095 | 0.202121895 |
| Single edit: thrA N710* | 70.70961053 | 0.13574364 |
| Single edit: thrA L728* | 1655.90606 | 3.178899079 |
| Single edit: thrA F460* | 767.1838152 | 1.472788815 |
| Single edit: thrA S557* | 750.1757878 | 1.440137927 |
| Single edit: thrA V715* | 466.4829595 | 0.895523174 |
| Single edit: thrA A736* | 261.4061471 | 0.501830255 |
| Single edit: thrA F644* | 246.565551 | 0.473340259 |
| Single edit: thrA E662* | 154.0800926 | 0.295792784 |
| Single edit: thrA G740* | 106.7111295 | 0.204856978 |
| Single edit: thrA L725* | 91.07208822 | 0.17483418 |
| Single edit: thrA S723* | 64.4711635 | 0.123767481 |
| Single edit: thrA P668* | 859.8784554 | 1.650737862 |
| Single edit: thrA R692* | 572.1827192 | 1.098438591 |
| Single edit: thrA G610* | 402.2989023 | 0.77230686 |
| Single edit: thrA K631* | 365.0804489 | 0.700857332 |
| Single edit: thrA R601* | 314.6043042 | 0.603956563 |
| Single edit: thrA F572* | 179.7685502 | 0.345107789 |
| Single edit: thrA N721* | 169.0327056 | 0.324497823 |
| Single edit: thrA P531* | 97.48404295 | 0.187143427 |
| Single edit: thrA W521* | 92.76793202 | 0.178089748 |
| Single edit: thrA A711* | 87.70949304 | 0.168378891 |
| Single edit: thrA R737* | 63.86650904 | 0.122606706 |
| Single edit: thrA L540* | 55.96462695 | 0.107437194 |
| Single edit: thrA D463* | 3663.479692 | 7.032906334 |
| Single edit: thrA I466* | 2500.818244 | 4.800905683 |
| Single edit: thrA V742* | 2258.597016 | 4.335905367 |
| Single edit: thrA K682* | 1994.458101 | 3.828828925 |
| Single edit: thrA E467* | 1342.21865 | 2.576702709 |
| Single edit: thrA Y665* | 427.7911234 | 0.821245143 |
| Single edit: thrA T576* | 411.4896155 | 0.789950584 |
| Single edit: thrA T658* | 333.6322596 | 0.640485175 |
| Single edit: thrA G502* | 184.2590358 | 0.353728326 |
| Single edit: thrA L510* | 169.0613669 | 0.324552845 |
| Single edit: thrA L525* | 84.56475151 | 0.162341824 |
| Single edit: thrA D678* | 2016.05926 | 3.870297404 |
| Single edit: thrA E649* | 1457.255214 | 2.797542306 |
| Single edit: thrA K741* | 1216.479897 | 2.335317756 |
| Single edit: thrA A660* | 876.9677646 | 1.683544789 |
| Single edit: thrA L604* | 690.1114546 | 1.324830388 |
| Single edit: thrA D627* | 472.9942153 | 0.908023053 |
| Single edit: thrA N582* | 214.8419124 | 0.412439313 |
| Single edit: thrA I496* | 79.60196339 | 0.152814591 |
| Single edit: thrA H514* | 57.2591372 | 0.10992231 |
| Single edit: thrA H573* | 1981.293303 | 3.803556016 |
| Single edit: thrA A561* | 1750.778761 | 3.361029425 |
| Single edit: thrA H590* | 703.9573771 | 1.351410875 |
| Single edit: thrA D673* | 486.5070663 | 0.933964131 |
| Single edit: thrA N776* | 287.8386872 | 0.5525737 |
| Single edit: thrA E628* | 85.13009237 | 0.163427128 |
| Single edit: thrA G634K | 1003.72 | 4.626532219 |
| Single edit: thrA S637P | 293.12 | 1.351106934 |
| Single edit: thrA S506D | 216.99 | 1.092724406 |
| Single edit: thrA R681H | 265.46 | 0.830782827 |
| Single edit: thrA D673N | 126.37 | 0.395479021 |
| Single edit: thrA L592R | 117.29 | 0.36707111 |
| Single edit: thrA G4775 | 65.43 | 0.32951158 |
| Single edit: thrA A687R | 40.19 | 0.169248991 |
| Single edit: thrA Q84H | 46.2 | 0.144583291 |
| Single edit: thrA D766P | 39.53 | 0.100546303 |
| Single edit: thrA L592G | 21.95 | 0.094255282 |
| Single edit: thrA P767L | 13.03 | 0.033153379 |
| Single edit: thrA Y785H | 8.5 | 0.02161568 |
| Single edit: thrA I616E | 7.94 | 0.020191831 |
| Single edit: thrA A808P | 3.3 | 0.01418256 |
| Single edit: thrA P787W | 2.45 | 0.01052523 |
| Single edit: thrA G676I | 2.13 | 0.009154439 |
| Single edit: thrA G774N | 2.12 | 0.006644687 |
| Single edit: thrA S506I | 2.34 | 0.005942154 |
| Single edit: thrA I616S | 1.57 | 0.00489896 |
| Single edit: thrA N621A | 1.43 | 0.004474036 |

[0048] Sequence ID numbers for the single variants are listed in Table 2 below:

TABLE 2
SEQ ID NOs

| SEQ ID NO: | Variant |
|---|---|
| SEQ ID NO: 1* | dapA E84T |
| SEQ ID NO: 2* | dapA J21300 |
| SEQ ID NO: 3* | lysC V339P |
| SEQ ID NO: 4** | garD J23101 |
| SEQ ID NO: 5** | yicL J23100 |
| SEQ ID NO: 6* | lysP R15*** |
| SEQ ID NO: 7** | mgsA J23100 |
| SEQ ID NO: 8* | pckE100Q |
| SEQ ID NO: 9** | amyA J23100 |
| SEQ ID NO: 10* | amyA P15*** |
| SEQ ID NO: 11* | cysN L5*** |
| SEQ ID NO: 12** | dosP J23100 |
| SEQ ID NO: 13** | emrE J23100 |
| SEQ ID NO: 14** | focB J23100 |
| SEQ ID NO: 15** | glnD J23100 |
| SEQ ID NO: 16* | glnE V15*** |
| SEQ ID NO: 17** | hicB J23100 |
| SEQ ID NO: 18** | maeB J23100 |
| SEQ ID NO: 19* | marA Y107D |
| SEQ ID NO: 20* | metL R241E |
| SEQ ID NO: 21* | mfd Y5*** |
| SEQ ID NO: 22* | nupX R5*** |
| SEQ ID NO: 23* | pck H232G |
| SEQ ID NO: 24** | phoB J23100 |
| SEQ ID NO: 25** | purM J23100 |
| SEQ ID NO: 26* | rlmL F5*** |
| SEQ ID NO: 27* | wzxB K5*** |
| SEQ ID NO: 28** | ydgl J23100 |
| SEQ ID NO: 29** | ydjE J23100 |
| SEQ ID NO: 30** | yliE J23100 |
| SEQ ID NO: 31** | yohF J23100 |
| SEQ ID NO: 32* | ytfP N15*** |
| SEQ ID NO: 33* | marA R94*** |
| SEQ ID NO: 34* | marA Y107K |
| SEQ ID NO: 35* | metL P240D |
| SEQ ID NO: 36* | metL V235C |
| SEQ ID NO: 37* | pck G64D |
| SEQ ID NO: 38** | setB J23100 |
| SEQ ID NO: 39** | ydfO J23100 |
| SEQ ID NO: 40** | ydgD J23100 |
| SEQ ID NO: 41** | yejG J23100 |
| SEQ ID NO: 42** | azoR J23100 |
| SEQ ID NO: 43* | cra ESA |
| SEQ ID NO: 44* | cra I6S |
| SEQ ID NO: 45* | cra S18L |
| SEQ ID NO: 46** | dtpA J23100 |
| SEQ ID NO: 47* | fnr R213A |
| SEQ ID NO: 48** | ftsY J23100 |
| SEQ ID NO: 49** | gpp J23100 |
| SEQ ID NO: 50* | lysC V339N |
| SEQ ID NO: 51* | marA K106D |
| SEQ ID NO: 52* | marA Y107M |
| SEQ ID NO: 53* | marA M109Q |
| SEQ ID NO: 54* | metL A50N |
| SEQ ID NO: 55* | metL R207C |
| SEQ ID NO: 56* | metL S230V |
| SEQ ID NO: 57* | metL W2291I |
| SEQ ID NO: 58* | mgsA JS23100 |
| SEQ ID NO: 59* | moaC M15** |
| SEQ ID NO: 60* | oppD Q15** |
| SEQ ID NO: 61* | rob K93P |
| SEQ ID NO: 62** | ycgI J23100 |
| SEQ ID NO: 63** | yeeP J23100 |
| SEQ ID NO: 64** | yihN J23100 |
| SEQ ID NO: 65* | yohO K5*** |
| SEQ ID NO: 66* | metF S15*** |
| SEQ ID NO: 67* | glgB A15*** |
| SEQ ID NO: 68* | yibL E5*** |
| SEQ ID NO: 69* | ppc R880W |
| SEQ ID NO: 70* | metE H641N |
| SEQ ID NO: 71* | metE C726H |
| SEQ ID NO: 72* | rffG V216D |
| SEQ ID NO: 73* | scpB G65N |
| SEQ ID NO: 74* | lysA H373Y |
| SEQ ID NO: 75* | lysA N58I |
| SEQ ID NO: 76* | lysC L377R |
| SEQ ID NO: 77* | tktB E191S |
| SEQ ID NO: 78* | tktB K342S |
| SEQ ID NO: 79* | tktB Q341K |
| SEQ ID NO: 80* | lysC T343I |
| SEQ ID NO: 81* | tktB F283F |
| SEQ ID NO: 82* | lysA M2318K |
| SEQ ID NO: 83* | tktB I102W |
| SEQ ID NO: 84* | dapA G76Y |
| SEQ ID NO: 85* | pck E239Y |
| SEQ ID NO: 86* | pck G208Q |
| SEQ ID NO: 87* | pck K106W |
| SEQ ID NO: 88* | pck S234C |
| SEQ ID NO: 89* | pck T176E |
| SEQ ID NO: 90* | pck N177C |
| SEQ ID NO: 91* | pck T499Y |
| SEQ ID NO: 92* | pck V55Q |
| SEQ ID NO: 93* | dapA L88A |
| SEQ ID NO: 94* | pck V48C |
| SEQ ID NO: 95* | pck V371H |
| SEQ ID NO: 96* | selA I15*** |
| SEQ ID NO: 97* | xy1H T15*** |
| SEQ ID NO: 98* | allC W15*** |
| SEQ ID NO: 99* | metB Q5*** |
| SEQ ID NO: 100* | metB N15*** |
| SEQ ID NO: 101** | metL J23100 |
| SEQ ID NO: 102** | nirB J23100 |
| SEQ ID NO: 103** | yrhC J23100 |
| SEQ ID NO: 104** | prlC J23100 |
| SEQ ID NO: 105** | argK J23100 |
| SEQ ID NO: 106** | glgP J23100 |
| SEQ ID NO: 107** | argA J23100 |
| SEQ ID NO: 108** | tmpR J23112 |
| SEQ ID NO: 109** | ugpQ J23112 |
| SEQ ID NO: 110** | bscF J23112 |
| SEQ ID NO: 111** | lafU J23112 |
| SEQ ID NO: 112** | prfH J23112 |
| SEQ ID NO: 113** | csiR J23106 |
| SEQ ID NO: 114** | feoA J23106 |
| SEQ ID NO: 115** | glgP J23106 |
| SEQ ID NO: 116* | dapA H56M |
| SEQ ID NO: 117* | dapA A79E |
| SEQ ID NO: 118* | dapA H56K |
| SEQ ID NO: 119* | dapA N80H |
| SEQ ID NO: 120* | dapAA79H |
| SEQ ID NO: 121* | dapA A79V |
| SEQ ID NO: 122* | dapA H56T |
| SEQ ID NO: 123* | dapA A79L |
| SEQ ID NO: 124* | dapF L45E |
| SEQ ID NO: 125* | pck M231L |
| SEQ ID NO: 126* | pck G107V |
| SEQ ID NO: 127* | dapA H56E |
| SEQ ID NO: 128* | dapA N80Q |
| SEQ ID NO: 129* | dapA A79N |
| SEQ ID NO: 130* | pck H232L |
| SEQ ID NO: 131* | dapA A79Y |
| SEQ ID NO: 132* | dapA H56Y |
| SEQ ID NO: 133* | dapA L88S |
| SEQ ID NO: 134* | dapA E84N |
| SEQ ID NO: 135* | lysA G148A |
| SEQ ID NO: 136* | dapF N190I |
| SEQ ID NO: 137* | lysC V339A |
| SEQ ID NO: 138** | yfcO J23112 |
| SEQ ID NO: 139* | aroE K15*** |
| SEQ ID NO: 140* | metL A772R |
| SEQ ID NO: 141* | metL D508H |
| SEQ ID NO: 142** | yijF J23101 |
| SEQ ID NO: 143* | dapA A81Q |
| SEQ ID NO: 144* | garD Q274D |
| SEQ ID NO: 145* | dapA L88D |
| SEQ ID NO: 146* | lysC V339D |
| SEQ ID NO: 147* | dapF L46N |
| SEQ ID NO: 148** | ribE J23101 |
| SEQ ID NO: 149* | lysC S338K |
| SEQ ID NO: 150* | argE L5*** |
| SEQ ID NO: 151** | acrD J23106 |
| SEQ ID NO: 152* | dapA L88F |
| SEQ ID NO: 153* | dapA Y106H |
| SEQ ID NO: 154* | yidR V5*** |
| SEQ ID NO: 155* | yicL R5*** |
| SEQ ID NO: 156* | dapA N80A |
| SEQ ID NO: 157* | hupA Q5*** |
| SEQ ID NO: 158* | yhjR G15*** |
| SEQ ID NO: 159* | yhdJ C5*** |
| SEQ ID NO: 160* | adeQ T15*** |
| SEQ ID NO: 161* | dppF A15*** |
| SEQ ID NO: 162* | dapA A81V |
| SEQ ID NO: 163* | dapA A57M |
| SEQ ID NO: 164* | yidG D3*** |
| SEQ ID NO: 165* | pck K106I |
| SEQ ID NO: 166* | metL P766F |
| SEQ ID NO: 167* | thrA G502P |
| SEQ ID NO: 168* | thrA K682G |
| SEQ ID NO: 169* | thrA G634I |
| SEQ ID NO: 170* | thrA Q487D |
| SEQ ID NO: 171* | thrA A808L |
| SEQ ID NO: 172* | thrA V609N |
| SEQ ID NO: 173* | thrA G477E |
| SEQ ID NO: 174* | thrA F603K |
| SEQ ID NO: 175* | thrA L480R |
| SEQ ID NO: 176* | thrA G474L |
| SEQ ID NO: 177* | thrA I685W |
| SEQ ID NO: 178* | thrA S637W |
| SEQ ID NO: 179* | thrA G626E |
| SEQ ID NO: 180* | thrA A777* |
| SEQ ID NO: 181* | thrA G626* |
| SEQ ID NO: 182* | thrA A581* |
| SEQ ID NO: 183* | thrA L683* |
| SEQ ID NO: 184* | thrA M677* |
| SEQ ID NO: 185* | thrA R671* |
| SEQ ID NO: 186* | thrA M586* |
| SEQ ID NO: 187* | thrA R744* |
| SEQ ID NO: 188* | thrA G638* |
| SEQ ID NO: 189* | thrA A680* |
| SEQ ID NO: 190* | thrA D648* |
| SEQ ID NO: 191* | thrA G753* |
| SEQ ID NO: 192* | thrA R681* |
| SEQ ID NO: 193* | thrA T657* |
| SEQ ID NO: 194* | thrA N748* |
| SEQ ID NO: 195* | thrA E751* |
| SEQ ID NO: 196* | thrA L684* |
| SEQ ID NO: 197* | thrA Y594* |
| SEQ ID NO: 198* | thrA I685* |
| SEQ ID NO: 199* | thrA Y589* |
| SEQ ID NO: 200* | thrA A760* |
| SEQ ID NO: 201* | thrA A656* |
| SEQ ID NO: 202* | thrA A595* |
| SEQ ID NO: 203* | thrA G664* |
| SEQ ID NO: 204* | thrA T462* |
| SEQ ID NO: 205* | thrA A504* |
| SEQ ID NO: 206* | thrA L647* |
| SEQ ID NO: 207* | thrA I749* |
| SEQ ID NO: 208* | thrA L705* |
| SEQ ID NO: 209* | thrA L509* |
| SEQ ID NO: 210* | thrA F709* |
| SEQ ID NO: 211* | thrA Y642* |
| SEQ ID NO: 212* | thrA A559* |
| SEQ ID NO: 213* | thrA L674* |
| SEQ ID NO: 214* | thrA K580* |
| SEQ ID NO: 215* | thrA I635* |
| SEQ ID NO: 216* | thrA L686* |
| SEQ ID NO: 217* | thrA A625* |
| SEQ ID NO: 218* | thrA I759* |
| SEQ ID NO: 219* | thrA A479* |
| SEQ ID NO: 220* | thrA R593* |
| SEQ ID NO: 221* | thrA S489* |
| SEQ ID NO: 222* | thrA D566* |
| SEQ ID NO: 223* | thrA R661* |
| SEQ ID NO: 224* | thrA S556* |
| SEQ ID NO: 225* | thrA G571* |
| SEQ ID NO: 226* | thrA D809* |
| SEQ ID NO: 227* | thrA V476* |
| SEQ ID NO: 228* | thrA V574* |
| SEQ ID NO: 229* | thrA L498* |
| SEQ ID NO: 230* | thrA Q558* |
| SEQ ID NO: 231* | thrA C755* |
| SEQ ID NO: 232* | thrA L694* |
| SEQ ID NO: 233* | thrA S639* |
| SEQ ID NO: 234* | thrA L768* |
| SEQ ID NO: 235* | thrA Y588* |
| SEQ ID NO: 236* | thrA L547* |
| SEQ ID NO: 237* | thrA G747* |
| SEQ ID NO: 238* | thrA M663* |
| SEQ ID NO: 239* | thrA V746* |
| SEQ ID NO: 240* | thrA A731* |
| SEQ ID NO: 241* | thrA A730* |
| SEQ ID NO: 242* | thrA Y564* |
| SEQ ID NO: 243* | thrA L811* |
| SEQ ID NO: 244* | thrA R812* |
| SEQ ID NO: 245* | thrA V754* |
| SEQ ID NO: 246* | thrA G634* |
| SEQ ID NO: 247* | thrA Q487* |
| SEQ ID NO: 248* | thrA L480* |
| SEQ ID NO: 249* | thrA S637* |
| SEQ ID NO: 250* | thrA A565* |
| SEQ ID NO: 251* | thrA V500* |
| SEQ ID NO: 252* | thrA K598* |
| SEQ ID NO: 253* | thrA K507* |
| SEQ ID NO: 254* | thrA N710* |
| SEQ ID NO: 255* | thrA L728* |
| SEQ ID NO: 256* | thrA F460* |
| SEQ ID NO: 257* | thrA S557* |
| SEQ ID NO: 258* | thrA V715* |
| SEQ ID NO: 259* | thrA A736* |
| SEQ ID NO: 260* | thrA F644* |
| SEQ ID NO: 261* | thrA E662* |
| SEQ ID NO: 262* | thrA G740* |
| SEQ ID NO: 263* | thrA L725* |
| SEQ ID NO: 264* | thrA S723* |
| SEQ ID NO: 265* | thrA P668* |
| SEQ ID NO: 266* | thrA R692* |
| SEQ ID NO: 267* | thrA G610* |
| SEQ ID NO: 268* | thrA K631* |
| SEQ ID NO: 269* | thrA R601* |
| SEQ ID NO: 270* | thrA F572* |
| SEQ ID NO: 271* | thrA N721* |
| SEQ ID NO: 272* | thrA P531* |
| SEQ ID NO: 273* | thrA W521* |
| SEQ ID NO: 274* | thrA A711* |
| SEQ ID NO: 275* | thrA R737* |
| SEQ ID NO: 276* | thrA L540* |
| SEQ ID NO: 277* | thrA D463* |
| SEQ ID NO: 278* | thrA I466* |
| SEQ ID NO: 279* | thrA V742* |
| SEQ ID NO: 280* | thrA K682* |
| SEQ ID NO: 281* | thrA E467* |
| SEQ ID NO: 282* | thrA Y665* |
| SEQ ID NO: 283* | thrA T576* |
| SEQ ID NO: 284* | thrA T658* |
| SEQ ID NO: 285* | thrA G502* |
| SEQ ID NO: 286* | thrA L510* |
| SEQ ID NO: 287* | thrA L525* |
| SEQ ID NO: 288* | thrA D678* |
| SEQ ID NO: 289* | thrA E649* |
| SEQ ID NO: 290* | thrA K741* |
| SEQ ID NO: 291* | thrA A660* |
| SEQ ID NO: 292* | thrA L604* |
| SEQ ID NO: 293* | thrA D627* |
| SEQ ID NO: 294* | thrA N582* |
| SEQ ID NO: 295* | thrA I496* |
| SEQ ID NO: 296* | thrA H514* |
| SEQ ID NO: 297* | thrA H573* |
| SEQ ID NO: 298* | thrA A561* |
| SEQ ID NO: 299* | thrA H590* |
| SEQ ID NO: 300* | thrA D673* |
| SEQ ID NO: 301* | thrA N776* |
| SEQ ID NO: 302* | thrA E628* |
| SEQ ID NO: 303* | thrA G634K |
| SEQ ID NO: 304* | thrA S637P |
| SEQ ID NO: 305* | thrA S506D |
| SEQ ID NO: 306* | thrA R681H |
| SEQ ID NO: 307* | thrA D673N |
| SEQ ID NO: 308* | thrA L592R |
| SEQ ID NO: 309* | thrA G477S |
| SEQ ID NO: 310* | thrA A687R |
| SEQ ID NO: 311* | thrA Q84H |
| SEQ ID NO: 312* | thrA D766P |
| SEQ ID NO: 313* | thrA L592G |
| SEQ ID NO: 314* | thrA P767L |
| SEQ ID NO: 315* | thrA Y785H |
| SEQ ID NO: 316* | thrA I616E |
| SEQ ID NO: 317* | thrA A808P |
| SEQ ID NO: 318* | thrA P787W |
| SEQ ID NO: 319* | thrA G676I |
| SEQ ID NO: 320* | thrA G774N |
| SEQ ID NO: 321* | thrA S506I |
| SEQ ID NO: 322* | thrA I616S |
| SEQ ID NO: 323* | thrA N621A |
| SEQ ID NO: 324* | pck A532S |

In the table, * after the SEQ ID NO: denotes an amino acid sequence (e.g., a change to the coding region of the protein), ** after the SEQ ID NO: denotes a nucleic acid sequence (e.g., a change to the promoter region or other noncoding region of the protein), “Phenotype FOWT” is fold over wild type (MG1655) in minimal medium; “Phenotype FIOPC” is fold improved over positive control which is MG1655 with E84T single variant. J231XX is a promoter swap at a given locus; *** as part of the variant shorthand denotes hits from the genome-wide knock out library where a triple-stop was inserted at a given position in the locus; * as part of the variant shorthand denotes hits from the genome-wide knock out library where a single-stop was inserted at a given position in the locus.

### EXAMPLES

[0049] Mutagenesis libraries specifically targeting the genes the DAP pathway, along with a number of genes whose enzymes convert products feeding into the DAP pathway were designed for saturation mutagenesis. Additionally, to more deeply explore the rest of the E. coli genome for new targets involved in lysine biosynthesis, libraries were designed to target all annotated loci with either premature stop codons (for a knock-out phenotype) or with an insertion of a set of five synthetic promoter variants (for expression modulation phenotypes). Then, the resulting lysine production levels from the single variants were used to conduct additional nucleic acid-guided nuclease editing in two engineered strains of MG1655 to produce double- and triple-variant engineered strains. The first engineered strain is strain MG1655 with a single mutation comprising dapA E84T (SEQ ID NO: 1), the lysine production for which was approximately 500-fold over wildtype lysine production in MG1655. The second engineered strain is strain MG1655 with a double mutation comprising dapA E84T (SEQ ID NO: 1) and dapA J23100 (a mutation in the E. coli dapA promoter, SEQ ID NO. 2), the lysine production for which was approximately 10,000-fold over wildtype lysine production. All libraries were screened at shallow sampling for lysine production via mass spec as described below.

### Editing Cassette and Backbone Amplification and Assembly

[0050] Editing Cassette Preparation: 5 nM oligonucleotides synthesized on a chip were amplified using Q5 polymerase in 50 μL volumes. The PCR conditions were 95° C. for 1 minute; 8 rounds of 95° C. for 30 seconds/60° C. for 30 seconds/72° C. for 2.5 minutes; with a final hold at 72° C. for 5 minutes. Following amplification, the PCR products were subjected to SPRI cleanup, where 30 μL SPRI mix was added to the 50 μL PCR reactions and incubated for 2 minutes. The tubes were subjected to a magnetic field for 2 minutes, the liquid was removed, and the beads were washed 2× with 80% ethanol, allowing 1 minute between washes. After the final wash, the beads were allowed to dry for 2 minutes, 50 μL 0.5× TE pH 8.0 was added to the tubes, and the beads were vortexed to mix. The slurry was incubated at room temperature for 2 minutes, then subjected to the magnetic field for 2 minutes. The eluate was removed and the DNA quantified.

[0051] Following quantification, a second amplification procedure was carried out using a dilution of the eluate from the SPRI cleanup. PCR was performed under the following conditions: 95° C. for 1 minute; 18 rounds of 95° C. for 30 seconds/72° C. for 2.5 minutes; with a final hold at 72° C. for 5 minutes. Amplicons were checked on a 2% agarose gel and pools with the cleanest output(s) were identified. Amplification products appearing to have heterodimers or chimeras were not used.

[0052] Backbone Preparation: A 10-fold serial dilution series of purified backbone was performed, and each of the diluted backbone series was amplified under the following conditions: 95° C. for 1 minute; then 30 rounds of 95° C. for 30 seconds/60° C. for 1.5 minutes/72° C. for 2.5 minutes; with a final hold at 72° C. for 5 minutes. After amplification, the amplified backbone was subjected to SPRI cleanup as described above in relation to the cassettes. The backbone was eluted into 100 μL ddH₂O and quantified before nucleic acid assembly.

[0053] Isothermal Nucleic Acid Assembly: 150 ng backbone DNA was combined with 100 ng cassette DNA. An equal volume of 2× Gibson Master Mix was added, and the reaction was incubated for 45 minutes at 50° C. After assembly, the assembled backbone and cassettes were subjected to SPRI cleanup, as described above.

### Transformation of Editing Vector Library into E cloni®

[0054] Transformation: 20 μL of the prepared editing vector Gibson Assembly reaction was added to 30 μL chilled water along with 10 μL E cloni® (Lucigen, Middleton, Wis.) supreme competent cells. An aliquot of the transformed cells were spot plated to check the transformation efficiency, where >100× coverage was required to continue. The transformed E cloni® cells were outgrown in 25 mL SOB+100 μg/mL carbenicillin (carb). Glycerol stocks were generated from the saturated culture by adding 500 μL 50% glycerol to 1000 μL saturated overnight culture. The stocks were frozen at −80° C. This step is optional, providing a ready stock of the cloned editing library. Alternatively, Gibson or another assembly of the editing cassettes and the vector backbone can be performed before each editing experiment.

### Creation of New Cell Line Transformed With Engine Vector

[0055] Transformation: 1 μL of the engine vector DNA (comprising a coding sequence for MAD7 nuclease under the control of the pL inducible promoter, a chloramphenicol resistance gene, and the μ Red recombineering system) was added to 50 μL EC83 strain E. coli cells. The transformed cells were plated on LB plates with 25 μg/mL chloramphenicol (chlor) and incubated overnight to accumulate clonal isolates. The next day, a colony was picked, grown overnight in LB+25 μg/mL chlor, and glycerol stocks were prepared from the saturated overnight culture by adding 500 μL 50% glycerol to 1000 μL culture. The stocks of EC1 comprising the engine vector were frozen at −80° C.

### Preparation of Competent Cells

[0056] A 1 mL aliquot of a freshly-grown overnight culture of EC83 cells transformed with the engine vector was added to a 250 mL flask containing 100 mL LB/SOB+25 μg/mL chlor medium. The cells were grown to 0.4-0.7 OD, and cell growth was halted by transferring the culture to ice for 10 minutes. The cells were pelleted at 8000× g in a JA-18 rotor for 5 minutes, washed 3x with 50 mL ice cold ddH₂O or 10% glycerol, and pelleted at 8000× g in JA-18 rotor for 5 minutes. The washed cells were resuspended in 5 mL ice cold 10% glycerol and aliquoted into 200 μL portions. Optionally at this point the glycerol stocks could be stored at −80° C. for later use.

### Screening of Edited Libraries for Lysine Production

[0057] Library stocks were diluted and plated onto 245×245mm LB agar plates (Teknova) containing 100 μg/mL carbenicillin (Teknova) and 25 μg/mL chloramphenicol (Teknova) using sterile glass beads. Libraries were diluted an appropriate amount to yield ˜2000-3000 colonies on the plates. Plates were incubated ˜16 h at 30° C. and then stored at 4° C. until use. Colonies were picked using a QPix™ 420 (Molecular Devices) and deposited into sterile 1.2 mL square 96-well plates (Thomas Scientific) containing 300 μL of overnight growth medium (EZ Rich Defined Medium, w/o lysine (Teknova), 100 μg/mL carbenicillin and 25 μg/mL chloramphenicol). Plates were sealed (AirPore sheets (Qiagen)) and incubated for ˜19 h in a shaker incubator (Climo-Shaker ISF1-X (Kuhner), 30° C., 85% humidity, 250 rpm). Plate cultures were then diluted 20-fold (15 μL culture into 285 μL medium) into new 96-well plates containing lysine production medium (20 g/L ammonium sulfate (Teknova), 200 mM MOPS buffer (Teknova), 3 mg/L Iron(II) sulfate heptahydrate (Sigma), 3 mg/L Manganese (II) sulfate monohydrate (Sigma), 0.5 mg/L Biotin (Sigma), 1 mg/L Thiamine hydrochloride (Sigma), 0.7 g/L Potassium chloride (Teknova), 20 g/L glucose (Teknova), 5 g/L Potassium phosphate monobasic (Sigma), 1 mL/L Trace metal mixture (Teknova), 1 mM Magnesium sulfate (Teknova), 100 μg/mL carbenicillin and 25 μg/mL chloramphenicol). Production plates were incubated for 24 h in a shaker incubator (Climo-Shaker ISF1-X (Kuhner), 30° C., 85% humidity, 250 rpm).

[0058] Production plates were centrifuged (Centrifuge 5920R, Eppendorf) at 3,000 g for 10 min to pellet cells. The supernatants from production plates were diluted 100-fold into water (5 μL of supernatant with 495 μL) of water in 1.2 mL square 96-well plates. Samples were thoroughly mixed and then diluted a subsequent 10-fold further into a 50:50 mixture of acetonitrile and water (20 μL sample with 180 μL of the acetonitrile/water mixture) into a 96-well Plate (polypropylene, 335 μL/well, Conical Bottom (Thomas Scientific). Plates were heat sealed and thoroughly mixed.

[0059] Lysine concentrations were determined using a RapidFire high-throughput mass spectrometry system (Agilent) coupled to a 6470 Triple Quad mass spectrometer (Agilent). The RapidFire conditions were as follows: Pump 1: 80% acetonitrile (LC/MS grade, Fisher), 20% water (LC/MS grade, Fisher), 1.5 mL/min, Pump 2: 100% water, 1.25 mL/min, Pump 3: 5% acetonitrile, 95% water, 1.25 mL/min. RapidFire method: Aspirate: 600 ms, Load/wash: 2000 ms, Extra wash: 0 ms, Elute: 3000 ms, Re-equilibrate: 500 ms. 10 μL injection loop.

### Mass Spectrometry Conditions For Lysine Detection

[0060] Precursor ion: 147.1 m/z, Product ion (quantifying): 84 m/z, Dwell: 20, Fragmentor: 80, Collision energy: 20, Cell accelerator voltage: 4, Polarity: positive Precursor ion: 147.1 m/z, Product ion (qualifying): 130 m/z, Dwell: 20, Fragmentor: 80, Collision energy: 8, Cell accelerator voltage: 4, Polarity: positive Source conditions: Gas Temp: 300° C., Gas Flow: 10 L/min, Nebulizer: 45 psi, Sheath gas temp: 350° C., Sheath gas flow: 11 L/min, Capillary voltage: 3000V (positive), Nozzle voltage: 1500V (positive)

[0061] Data was analyzed using MassHunter Quantitative Analysis software (Agilent) with a standard curve of lysine used for quantitation of lysine in the samples. Each 96-well plate of samples contained 4 replicates of the wildtype strain and 4 replicates of the dapA E84T positive control strain to calculate the relative lysine yield of samples compared to the controls. Hits from the primary screen were re-tested in quadruplicate using a similar protocol as described above.

[0062] While this invention is satisfied by embodiments in many different forms, as described in detail in connection with preferred embodiments of the invention, it is understood that the present disclosure is to be considered as exemplary of the principles of the invention and is not intended to limit the invention to the specific embodiments illustrated and described herein. Numerous variations may be made by persons skilled in the art without departure from the spirit of the invention. The scope of the invention will be measured by the appended claims and their equivalents. The abstract and the title are not to be construed as limiting the scope of the present invention, as their purpose is to enable the appropriate authorities, as well as the general public, to quickly determine the general nature of the invention. In the claims that follow, unless the term “means” is used, none of the features or elements recited therein should be construed as means-plus-function limitations pursuant to 35 U.S.C. §112, ¶6.

We claim:

1. An engineered E. coli cell comprising the following variant sequences: a dapA protein having an amino acid sequence of SEQ ID NO: 1 and a dapA gene promoter sequence having a nucleic acid sequence of SEQ ID NO: 2 driving expression of a dapA protein; and comprising additional variant proteins selected from the following variant proteins:
a purM gene promoter sequence having a nucleic acid sequence of SEQ ID NO: 25 driving expression of the purM gene and a dosP gene promoter sequence having a nucleic acid sequence of SEQ ID NO: 12 driving expression of a dosP protein;
the purM gene promoter sequence having the nucleic acid sequence of SEQ ID NO: 25 driving expression of the purM gene and a glnD gene promoter sequence having a nucleic acid sequence of SEQ ID NO: 15 driving expression of a glnD protein;
a pck gene having an amino acid sequence of SEQ ID NO: 324 and the glnD gene promoter sequence having the nucleic acid sequence of SEQ ID NO: 15 driving expression of the glnD protein;
a metL gene having an amino acid sequence of SEQ ID NO: 20;
a glnE gene having an amino acid sequence of SEQ ID NO: 16;
the glnD gene promoter sequence having the nucleic acid sequence of SEQ ID NO: 15 driving expression of the glnD protein; or
a ytfP gene having an amino acid sequence of SEQ ID NO: 32.

2. The engineered E. coli cell of claim 1, comprising the dapA protein having the amino acid sequence of SEQ ID NO: 1; the dapA gene promoter sequence having the nucleic acid sequence of SEQ ID NO: 2 driving expression of the dapA protein; the purM gene promoter sequence having the nucleic acid sequence of SEQ ID NO: 25 driving expression of the purM gene; and the dosP gene promoter sequence having the nucleic acid sequence of SEQ ID NO: 12 driving expression of the dosP protein.

3. The engineered E. coli cell of claim 1, comprising the dapA protein having the amino acid sequence of SEQ ID NO: 1; the dapA gene promoter sequence having the nucleic acid sequence of SEQ ID NO: 2 driving expression of the dapA protein; the purM gene promoter sequence having the nucleic acid sequence of SEQ ID NO: 25 driving expression of the purM gene; and the glnD gene promoter sequence having the nucleic acid sequence of SEQ ID NO: 15 driving expression of the glnD protein.

4. The engineered E. coli cell of claim 1, comprising the dapA protein having the amino acid sequence of SEQ ID NO: 1; the dapA gene promoter sequence having the nucleic acid sequence of SEQ ID NO: 2 driving expression of the dapA protein; the pck gene having the amino acid sequence of SEQ ID NO: 324; and the glnD gene promoter sequence having the nucleic acid sequence of SEQ ID NO: 15 driving expression of the glnD protein.

5. The engineered E. coli cell of claim 1, comprising the dapA protein having the amino acid sequence of SEQ ID NO: 1; the dapA gene promoter sequence having the nucleic acid sequence of SEQ ID NO: 2 driving expression of the dapA protein; and the metL gene having the amino acid sequence of SEQ ID NO: 20.

6. The engineered E. coli cell of claim 1, comprising the dapA protein having the amino acid sequence of SEQ ID NO: 1; the dapA gene promoter sequence having the nucleic acid sequence of SEQ ID NO: 2 driving expression of the dapA protein; and the glnE gene having the amino acid sequence of SEQ ID NO: 16.

7. The engineered E. coli cell of claim 1, comprising the dapA protein having the amino acid sequence of SEQ ID NO: 1; the dapA gene promoter sequence having the nucleic acid sequence of SEQ ID NO: 2 driving expression of the dapA protein; and the glnD gene promoter sequence having the nucleic acid sequence of SEQ ID NO: 15 driving expression of the glnD protein.

8. The engineered E. coli cell of claim 1, comprising the dapA protein having the amino acid sequence of SEQ ID NO: 1; the dapA gene promoter sequence having the nucleic acid sequence of SEQ ID NO: 2 driving expression of the dapA protein; and the ytfP gene having the amino acid sequence of SEQ ID NO: 32.

9. An engineered E. coli cell comprising the following variant sequences: a dapA protein having an amino acid sequence of SEQ ID NO: 1 and comprising an additional variant protein selected from the following variant proteins:
an azoR gene promoter sequence having a nucleic acid sequence of SEQ ID NO: 42 driving expression of an azoR protein;
a cra gene having an amino acid sequence of SEQ ID NO: 43;
a cra gene having an amino acid sequence of SEQ ID NO: 44;
a cra gene having an amino acid sequence of SEQ ID NO: 45;
a dptA gene promoter sequence having a nucleic acid sequence of SEQ ID NO: 46 driving expression of a dptA protein;
an fnr gene having an amino acid sequence of SEQ ID NO: 47;
an ftsY gene promoter sequence having a nucleic acid sequence of SEQ ID NO: 48 driving expression of an ftsY protein;
a glnD gene promoter sequence having a nucleic acid sequence of SEQ ID NO: 15 driving expression of a glnD protein;
a gpp gene promoter sequence having a nucleic acid sequence of SEQ ID NO: 49 driving expression of a gpp protein;
a lysC gene having an amino acid sequence of SEQ ID NO: 50;
a lysC gene having an amino acid sequence of SEQ ID NO: 3; or
a marA gene having an amino acid sequence of SEQ ID NO: 51.

10. The engineered E. coli cell of claim 1, comprising the dapA protein having the amino acid sequence of SEQ ID NO: 1 and the azoR gene promoter sequence having the nucleic acid sequence of SEQ ID NO: 42 driving expression of the azoR protein.

11. The engineered E. coli cell of claim 1, comprising the dapA protein having the amino acid sequence of SEQ ID NO: 1 and the cra gene having the amino acid sequence of SEQ ID NO: 43.

12. The engineered E. coli cell of claim 1, comprising the dapA protein having the amino acid sequence of SEQ ID NO: 1 and the cra gene having the amino acid sequence of SEQ ID NO: 44.

13. The engineered E. coli cell of claim 1, comprising the dapA protein having the amino acid sequence of SEQ ID NO: 1 and the cra gene having the amino acid sequence of SEQ ID NO: 45.

14. The engineered E. coli cell of claim 1, comprising the dapA protein having the amino acid sequence of SEQ ID NO: 1 and the dptA gene promoter sequence having the nucleic acid sequence of SEQ ID NO: 46 driving expression of the dptA protein.

15. The engineered E. coli cell of claim 1, comprising the dapA protein having the amino acid sequence of SEQ ID NO: 1 and the fnr gene having the amino acid sequence of SEQ ID NO: 47.

16. The engineered E. coli cell of claim 1, comprising the dapA protein having the amino acid sequence of SEQ ID NO: 1 and the ftsY gene promoter sequence having the nucleic acid sequence of SEQ ID NO: 48 driving expression of the ftsY protein.

17. The engineered E. coli cell of claim 1, comprising the dapA protein having the amino acid sequence of SEQ ID NO: 1 and the glnD gene promoter sequence having the nucleic acid sequence of SEQ ID NO: 15 driving expression of the glnD protein.

18. The engineered E. coli cell of claim 1, comprising the dapA protein having the amino acid sequence of SEQ ID NO: 1 and the gpp gene promoter sequence having the nucleic acid sequence of SEQ ID NO: 49 driving expression of the gpp protein.

19. The engineered E. coli cell of claim 1, comprising the dapA protein having the amino acid sequence of SEQ ID NO: 1 and the lysC gene having the amino acid sequence of SEQ ID NO: 50.

20. The engineered E. coli cell of claim 1, comprising the dapA protein having an amino acid sequence of SEQ ID NO: 1 and the lysC gene having the amino acid sequence of SEQ ID NO: 3.

21. The engineered E. coli cell of claim 1, comprising the dapA protein having an amino acid sequence of SEQ ID NO: 1 and the marA gene having the amino acid sequence of SEQ ID NO: 51.

The application's sequence listing, which the Patent Office published only in electronic form, follows.

SEQUENCE LISTING (324 sequences)

SEQ ID NO: 1 - protein, 292 aa, Escherichia coli
MFTGSIVAIVTPMDEKGNVCRASLKKLIDYHVASGTSAIVSVGTTGESATLNHDEHADVVMMTLDLADGRIPVIAGTGANATATAISLTQRFNDSGIVGCLTVTPYYNRPSQEGLYQHFKAIAEHTDLPQILYNVPSRTGCDLLPETVGRLAKVKNIIGIKEATGNLTRVNQIKELVSDDFVLLSGDDASALDFMQLGGHGVISVTANVAARDMAQMCKLAAEGHFAEARVINQRLMPLHNKLFVEPNPIPVKWACKELGLVATDTLRLPMTPITDSGRETVRAALKHAGLL

SEQ ID NO: 2 - DNA, 1000 bp, Escherichia coli
ttgcttttaatgccataccaaacgtaccattgagacacttgtttgcacagaggatggcccttgacggctagctcagtcctaggtacagtgctagctaagtaggtacgtaaggaggtgataaatgttcacgggaagtattgtcgcgattgttactccgatggatgaaaaaggtaatgtctgtcgggctagcttgaaaaaactgattgattatcatgtcgccagcggtacttcggcgatcgtttctgttggcaccactggcgagtccgctaccttaaatcatgacgaacatgctgatgtggtgatgatgacgctggatctggctgatgggcgcattccggtaattgccgggaccggcgctaacgctactgcggaagccattagcctgacgcagcgcttcaatgacagtggtatcgtcggctgcctgacggtaaccccttactacaatcgtccgtcgcaagaaggtttgtatcagcatttcaaagccatcgctgagcatactgacctgccgcaaattctgtataatgtgccgtcccgtactggctgcgatctgctcccggaaacggtgggccgtctggcgaaagtaaaaaatattatcggaatcaaagaggcaacagggaacttaacgcgtgtaaaccagatcaaagagctggtttcagatgattttgttctgctgagcggcgatgatgcgagcgcgctggacttcatgcaattgggcggtcatggggttatttccgttacggctaacgtcgcagcgcgtgatatggcccagatgtgcaaactggcagcagaagggcattttgccgaggcacgcgttattaatcagcgtctgatgccattacacaacaaactatttgtcgaacccaatccaatcccggtgaaatgggcatgtaaggaactgggtcttgtggcgaccgatacgctgcgcctgccaatgacaccaatcaccgacagtggtcgtgagacggtcagagcggcgcttaagcatgccggtttgctgtaa

SEQ ID NO: 3 - protein, 449 aa, Escherichia coli
MSEIVVSKFGGTSVADFDAMNRSADIVLSDANVRLVVLSASAGITNLLVALAEGLEPGERFEKLDAIRNIQFAILERLRYPNVIREEIERLLENITVLAEAAALATSPALTDELVSHGELMSTLLFVEILRERDVQAQWFDVRKVMRTNDRFGRAEPDIAALAELAALQLLPRLNEGLVITQGFIGSENKGRTTTLGRGGSDYTAALLAEALHASRVDIWTDVPGIYTTDPRVVSAAKRIDEIAFAEAAEMATFGAKVLHPATLLPAVRSDIPVFVGSSKDPRAGGTLVCNKTENPPLFRALALRRNQTLLTLHSLNMLHSRGFLAEVFGILARHNISPDLITTSEVSVALTLDTTGSTSTGDTLLTQSLLMELSALCRVEVEEGLALVALIGNDLSKACGVGKEVFGVLEPFNIRMICYGASSHNLCFLVPGEDAEQVVQKLHSNLFE

SEQ ID NO: 4 - DNA, 1693 bp, Escherichia coli
ttatttttaaatgagaccaggtcctcattttaataacccctggctggagaatattgcacatttacagctagctcagtcctaggtattatgctagctaagtaggtacgtaaggaggtgataaatggccaacatcgaaatcagacaagaaacgccaactgcgttttatataaaagttcacgacacagataatgtggcaattattgttaatgataatggcctgaaagcaggaacgcgttttccggatgggctggaattaattgaacatattccccaggggcataaagtcgcattgctggacattccggctaatggtgaaattattcgttatggcgaagtgattggttacgccgtgcgtgcaatcccacgcggaagctggatcgacgaatcaatggttgtactaccggaagcgccgccgttacacacgctgccactggcaaccaaagtcccggaacccttaccgccgctggaaggatacacctttgagggctatcgcaatgccgatggcagcgtgggcaccaaaaacctgctcggtatcaccaccagcgtccactgtgtggcaggcgtggtggactatgtagtaaaaatcattgaacgcgatctgctaccgaaatacccgaacgtcgatggcgtggtggggctgaatcatttgtacggttgtggcgtggcgattaacgcaccggcggcagttgtacctatccgtaccattcacaatatttcgctgaatcctaactttggcggcgaagtaatggtgattggcctgggttgtgaaaagttgcagcctgagcgcctgctgactggaacggatgatgtgcaagctattccagtagaaagcgccagcattgtcagtttgcaggatgaaaagcatgtcggttttcagtccatggtcgaggatattttgcagatcgccgaacgccatctacaaaaactgaatcaacggcagcgagaaacctgcccggcttcagaactggtcgttggtatgcagtgcggtggcagcgatgcgttttctggtgtaacggcaaacccggcggttggctatgcgtctgatctactggtgcgctgcggcgcaacggtgatgttttcagaagtaacggaagtgcgtgacgcgatccatctgctgacaccacgcgcagtgaacgaagaggtcggcaaacggctgctggaggagatggagtggtacgataactatctcaatatgggaaaaaccgaccgcagcgccaacccttcgccgggcaacaagaaaggcggtctggcaaacgtggtagagaaggcactcggctccattgctaaatcgggtaaaagcgcaattgttgaagtgctgtcgcccggtcaacgcccgactaaacgcggattaatttacgccgcgacgccagccagcgattttgtctgtggcacgcaacaggtggcttcgggtatcacagtgcaagtgtttacgaccggtcgtggtacgccgtacggcctgatggcggtacccgtcattaaaatggcaacccgcaccgagctggcgaaccgctggtttgatttaatggatattaatgcgggcaccatcgctaccggcgaagaaactattgaagaggtgggctggaagttgttccactttattctcgacgtcgccagcgggaagaagaaaaccttctcggatcaatgggggctgcataaccagctggcggtgtttaacccggcaccggtgacctga

SEQ ID NO: 5 - DNA, 1045 bp, Escherichia coli
tcgccatttttgctatcatgcctgcatacataaacgacaaaacagtatgcagagggaaaattgacggctagctcagtcctaggtacagtgctagctaagtaggtacgtaaggaggtgataaatgggttccaccagaaaggggatgctgaacgttctgattgccgccgtgttgtggggaagttcaggggtctgcgcgcaatacatcatggagcaaagccagatgtcgtcgcagtttttgactatgacgcgtttgatattcgccggtttgattctactgacgctgtcatttgttcatggcgataaaatcttttctattattaacaatcataaagatgccattagcctgctgattttttccgtggttggcgcgctaactgtacagctcacttttttgctaaccatcgaaaaatcgaacgcagccacggcaacggtgctgcaattcctctcaccgacgattatcgtcgcctggttctcactggtgcgtaaatcgcgcccgggcattctggttttctgcgctattttgacatcgctggtcgggacttttttattggtgacacacggtaatccgacgtcattatcgatctctcctgccgcgttgttctggggcattgcctcggcatttgctgctgcattctataccacctatccctcaacgctaattgcccgctatggcacgttaccagtcgtcggctggagtatgctgattggcggtctgattctgttgcctttttatgccagacaaggaacaaactttgtcgttaacggcagtttgattctggcgtttttttatttggtggtcattggtacgtccctgacatttagtctgtacctgaaaggagcacaattaattggcggtccaaaagccagcattttgagctgtgcagaaccattaagtagcgcgctactctctttgctgttgctggggatcacgttcacattaccggactggctgggaacgctgctgattctgtcatcggtgattttgatttcaatggattcccgtcgccgcgccagaaaaataaatcgtccggcgcggcataagtga

SEQ ID NO: 6 - protein, 14 aa, Escherichia coli
MVSETKTTEAPGLR

SEQ ID NO: 7 - DNA, 580 bp, Escherichia coli
tatcttgcagcgataagtgcttacagtaatctgtaggaaagttaactacggatgtacattttgacggctagctcagtcctaggtacagtgctagctaagtaggtacgtaaggaggtgataaatggaactgacgactcgcactttacctgcgcggaaacatattgcgctggtggcacacgatcactgcaaacaaatgctgatgagctgggtggaacggcatcaaccgttactggaacaacacgtactgtatgcaacaggcactaccggtaacttaatttcccgcgcgaccggcatgaacgtcaacgcgatgttgagtggcccaatggggggtgaccagcaggttggcgcattgatctcagaagggaaaattgatgtattgattttcttctgggatccactaaatgccgtgccgcacgatcctgacgtgaaagccttgctgcgtctggcgacggtatggaacattccggtcgccaccaacgtggcaacggcagacttcataatccagtcgccgcatttcaacgacgcggtcgatattctgatccccgattatcagcgttatctcgcggaccgtctgaagtaa

SEQ ID NO: 8 - protein, 540 aa, Escherichia coli
MRVNNGLTPQELEAYGISDVHDIVYNPSYDLLYQEELDPSLTGYERGVLTNLGAVAVDTGIFTGRSPKDKYIVRDDTTRDTFWWADKGKGKNDNKPLSPQTWQHLKGLVTRQLSGKRLFVVDAFCGANPDTRLSVRFITEVAWQAHFVKNMFIRPSDEELAGFKPDFIVMNGAKCTNPQWKEQGLNSENFVAFNLTERMQLIGGTWYGGEMKKGMFSMMNYLLPLKGIASMHCSANVGEKGDVAVFFGLSGTGKTTLSTDPKRRLIGDDEHGWDDDGVFNFEGGCYAKTIKLSKEAEPEIYNAIRRDALLENVTVREDGTIDFDDGSKTENTRVSYPIYHIDNIVKPVSKAGHATKVIFLTADAFGVLPPVSRLTADQTQYHFLSGFTAKLAGTERGITEPTPTFSACFGAAFLSLHPTQYAEVLVKRMQAAGAQAYLVNTGWNGTGKRISIKDTRAIIDAILNGSLDNAETFTLPMFNLAIPTELPGVDTKILDPRNTYASPEQWQEKAETLAKLFIDNFDKYTDTPAGAALVAAGPKL

SEQ ID NO: 9 - DNA, 1609 bp, Escherichia coli
gctcgcgaataatccgattacggctacgcttctaatgttccccttgaatggagtcgaagattgacggctagctcagtcctaggtacagtgctagctaagtaggtacgtaaggaggtgataaatgcgtaatcccacgctgttacaatgttttcactggtattacccggaaggcggtaagctctggcctgaactggccgagcgcgccgacggttttaatgatattggtatcaatatggtctggttgccgcccgcctataaaggcgcatcgggcgggtattcggtcggctacgactcctatgatttatttgatttaggcgagtttgatcagaaaggcagcatccctactaaatatggcgataaagcacaactgctggccgccattgatgctctgaaacgtaatgacattgcggtgctgttggatgtggtagtcaaccacaaaatgggcgcggatgaaaaagaagctattcgcgtgcagcgtgtaaatgctgatgaccgtacgcaaattgacgaagaaatcattgagtgtgaaggctggacgcgttacaccttccccgcccgtgccgggcaatactcgcagtttatctgggatttcaaatgttttagcggtatcgaccatatcgaaaaccctgacgaagatggcatttttaaaattgttaacgactacaccggcgaaggctggaacgatcaggttgatgatgaattaggtaatttcgattatctgatgggcgagaatatcgattttcgcaatcatgccgtgacggaagagattaaatactgggcgcgctgggtgatggaacaaacgcaatgcgacggttttcgtcttgatgcggtcaaacatattccagcctggttttataaagagtggatcgaacacgtacaggaagttgcgccaaagccgctgtttattgtggcggagtactggtcgcatgaagttgataagctgcaaacgtatattgatcaggtggaaggcaaaaccatgctgtttgatgcgccgctgcagatgaaattccatgaagcatcgcgcatggggcgcgactacgacatgacgcagattttcacgggtacattagtggaagccgatcctttccacgccgtgacgctcgttgccaatcacgacacccaaccgttgcaagccctcgaagcgccggtcgaaccgtggtttaaaccgctggcgtatgccttaattttgttgcgggaaaatggcgttccttcggtattctatccggacctctacggtgcgcattacgaagatgtcggtggtgacgggcaaacctatccgatagatatgccaataatcgaacagcttgatgagttaattctcgcccgtcagcgtttcgcccacggtgtacagacgttatttttcgaccatccgaactgcattgcctttagccgcagtggcaccgacgaatttcccggctgcgtggtggtcatgtcgaacggggatgatggcgaaaaaaccattcatctgggagagaattacggcaataaaacctggcgtgattttctggggaaccggcaagagagagtagtgaccgacgaaaacggcgaagcaaccttcttttgcaacggcggcagcgtcagcgtgtgggttatcgaagaggtgatttaa

SEQ ID NO: 10 - protein, 14 aa, Escherichia coli
MRNPTLLQCFHWYY

SEQ ID NO: 11 - protein, 4 aa, Escherichia coli
MNTA

SEQ ID NO: 12 - DNA, 2521 bp, Escherichia coli
agaaaccgtgttgaactctggaaagccagtctttagatgcgccaggatgcagaggtaatcttgacggctagctcagtcctaggtacagtgctagctaagtaggtacgtaaggaggtgataaatgaagctaaccgatgcggataatgccgccgatggcatttttttccccgcccttgagcaaaatatgatgggtgcggtgttaattaacgaaaatgatgaagtgatgtttttcaaccccgccgcagagaagctctggggatacaaacgtgaagaagtcattggcaataacattgatatgctgattccgcgggatttgcgtcctgcgcatcctgaatacattcgtcacaaccgtgaaggcggtaaagcgcgtgttgaggggatgagtcgggagctgcagctggagaaaaaagacggcagtaaaatctggacccgttttgcgctatcgaaagtgagcgccgaggggaaagtttattacctggcgctggtacgggatgccagcgtagaaatggcgcaaaaagaacagacccgacaattgattattgccgttgaccatctcgaccgaccggtgattgtcctcgatccggaacgccatattgtgcagtgcaatcgcgcatttaccgaaatgtttggttactgcattagcgaagccagcggtatgcagcccgatacactcctgaacattcctgaattccctgccgataaccgcattcgtttacaacagttgctatggaaaaccgcccgcgatcaggacgaatttctgctgttgacgcgcaccggtgaaaaaatctggattaaagcctctatcagcccggtttatgacgtgctcgcgcatctgcagaacctggtaatgactttctcggatatcaccgaagaacggcagattcgccagcttgaaggcaatattctcgccgccatgtgcagcagcccgccatttcatgaaatgggggaaatcatttgtcgtaacatcgaatctgtactcaacgaatcgcatgtttcgctgttcgcactgcgcaacgggatgccgatacactgggcgtcatcttcccacggtgcagaaattcaaaatgcgcaaagctggtcagcgaccattcgtcagcgtgatggcgcgcctgcggggatcctgcaaattaaaacctcgtcaggagcagaaaccagcgcctttatcgaacgcgtggcagatatcagccagcatatggccgcgctggcgctggaacaggaaaaaagccgtcagcatattgaacaactcatccaatttgatccgatgaccggtctgccaaatcgcaataacctgcacaattacctcgatgacctggtcgacaaagccgtctctcccgtggtgtatctcatcggtgttgaccatattcaggatgtgattgatagccttggctatgcgtgggccgatcaggcattgctggaagtggtcaatcgctttcgtgaaaaactcaaaccggatcagtatctctgtcgtatcgaaggtacgcagtttgtcctcgtgagcctcgaaaacgacgtcagtaacattacccaaatcgccgatgagctacggaatgtggtcagcaagccgataatgattgacgataaacccttcccgcttaccttgagtattggcatcagctacgacctgggtaaaaaccgcgattacttgctctccactgctcacaatgcaatggattatattcgcaagaatggcggtaacggctggcagttcttcagcccggcgatgaacgaaatggtaaaagagcgtttggttttaggcgcagcgctgaaagaagcgattagcaataaccaactgaaactggtttaccagccgcaaatcttcgcagaaacgggtgaactgtacggcatcgaagcccttgctcgctggcacgatcccctgcatggtcatgtgcccccttcacggtttattcctctcgcagaagagattggtgaaatcgaaaatattgggcgctgggtcatcgcggaagcttgccgtcagttagcagaatggcgtagccagaatattcatatcccggcgttatccgtgaacttgtcggcgctgcactttcgcagtaatcaactgcctaatcaggtgtctgatgcaatgcacgcctggggtattgacggccaccagctgacggtagaaatcacggaaagcatgatgatggaacacgataccgaaatctttaagcgcattcagatcctgcgtgatatgggcgtgggcttatcggtagatgattttggtacgggcttttccggattatcccgcttagtcagtcttccggtaacggaaatcaaaattgacaaaagttttgtcgatcgttgtctgaccgaaaaacgcatccttgccttacttgaagccattaccagcattgggcaaagcctcaatttaaccgtcgtggcggaaggcgtcgaaaccaaagagcaatttgagatgctacgcaagatccactgtcgcgttattcagggatatttcttttcccgccccctacccgccgaagaaattccaggctggatgagcagcgtgttaccgctgaaaatctga

SEQ ID NO: 13 - DNA, 454 bp, Escherichia coli
ggtgagttgagttcaaactgtagtacaattctctccagtttgaacaggaaagaatatgctttgacggctagctcagtcctaggtacagtgctagctaagtaggtacgtaaggaggtgataaatgaacccttatatttatcttggtggtgcaatacttgcagaggtcattggtacaaccttaatgaagttttcagaaggttttacacggttatggccatctgttggtacaattatttgttattgtgcatcattctggttattagctcagacgctggcttatattcctacagggattgcttatgctatctggtcaggagtcggtattgtcctgattagcttactgtcatggggatttttcggccaacggctggacctgccagccattataggcatgatgttgatttgtgccggtgtgttgattattaatttattgtcacgaagcacaccacattaa

SEQ ID NO: 14 - DNA, 970 bp, Escherichia coli
atgcagcggctggggatctcggttcgcgaggtgttgtaatctgcttttgcaggagtatgcttgacggctagctcagtcctaggtacagtgctagctaagtaggtacgtaaggaggtgataaatgagaaacaaactctctttcgacttgcagttgagcgccagaaaagcggcaatcgctgaacggattgccgcccataaaattgcccgcagtaaagtgtcggtctttttaatggcgatgtccgctggcgtgtttatggcgatcggatttactttttacctttccgttatcgccgatgccccgtcttcacaggcattaacccatctggtgggcggcctttgctttacactcggctttattttgctggcggtttgcggcaccagcctgttcacctcgtcggtaatgacggtgatggcaaaaagtcggggcgttattagttggcgaacttggctgattaacgcacttctggtggcctgcggtaatctggcaggtattgcctgtttcagtttgttaatctggttttccgggctggtgatgagtgaaaacgcgatgtggggagtcgcggttttacactgcgccgagggcaaaatgcatcatacatttactgaatctgtcagcctcggcattatgtgcaatctgatggtttgcctggcgctgtggatgagttattgcgggcgttcgttatgcgacaaaatcgtcgccatgattttgcccatcaccctgtttgtcgccagtggctttgagcactgtatcgccaatttgtttgtgattccgttcgccattgccattcgccatttcgcccctccccccttctggcagctggcgcacagtagcgcagacaattttccggcactgacggtcagccattttattaccgccaatctgctcccggtgatgctgggtaatattatcggcggtgcggtgctggtgagtatgtgttatcgggctatttatttacgtcaggaaccctga

SEQ ID NO: 15 - DNA, 2794 bp, Escherichia coli
atgaagccggcgaatgccggcttttttaatgcgataatttaatcttatgggtggcgcacattgacggctagctcagtcctaggtacagtgctagctaagtaggtacgtaaggaggtgataaatgaatacccttccagaacagtacgcaaacaccgctctccccaccctgcccggtcaaccgcaaaatccatgcgtctggccccgtgatgaattaaccgtcggtgggataaaagcccatatcgatactttccagcgttggctgggtgatgcctttgacaatgggatctctgcagaacagttgattgaggcgcgcaccgagtttatcgaccagctcctgcaacgattatggattgaagcgggattcagccagattgccgacctggcattggtcgccgtcggtggctacggtcgtggcgagctgcatccactttcagacgtcgatttactgattttaagccgtaaaaagctcccggacgatcaggcgcaaaaagtgggcgagctgttaacgctgctctgggatgtaaagctggaagtcggtcatagcgtgcgcacgcttgaagagtgcatgctggaagggttatcggatttaaccgtcgccaccaatttaatcgaatcccgcttattaattggcgatgttgcgctgttcctcgaactgcaaaaacatattttcagcgaaggattctggccttccgacaagttctacgcggcgaaagttgaagaacagaaccagcgccatcagcgttaccatggcaccagctacaaccttgaaccagacatcaaaagcagccctggcggcttgcgcgatatccacactctgcaatgggtggcccgccgtcattttggcgcaacatcgctggatgaaatggtcgggtttggcttcttaacctcagcggagcgggcggaattaaacgaatgtctgcatatattgtggcgtattcgctttgccctgcatctggtcgtcagccgttacgataatcgcctgttattcgatcgccagcttagcgtcgcccagcgtctgaattacagtggtgaaggtaacgaaccggtcgagcggatgatgaaggattacttccgcgttacacgccgcgtcagtgaactcaaccagatgctgctgcaactgttcgatgaagccatcctcgcccttcccgccgacgaaaaaccacgtccaatcgacgatgagtttcagctacgcggtacgctaatcgacctgcgtgatgaaacactatttatgcgccagccggaagccatcttgcgtatgttctacaccatggtgcacaacagtgcgatcaccggcatttactccaccacgctgcgccagttacgccatgcccgtcgccatctgcaacaaccgctgtgtaatattccggaagcacgaaaactgtttttgagcattctgcgtcaccccggagcggtgcggcgcgggctattgccaatgcatcgccatagcgtgctcggcgcgtatatgccgcaatggtcgcatatcgtcgggcagatgcagtttgatctgttccacgcctacacggtggatgaacatactatccgcgtgatgctgaaactggagagttttgccagtgaagaaacgcgccagcgccatccgttgtgtgtggacgtctggccgcgcctgccgtcaactgagctgattttcatcgccgcgctgtttcacgatatcgccaaaggacgcggcggcgaccactccattctcggtgctcaggatgtagtgcattttgccgaactccacgggctgaactcacgcgaaacacagctggtcgcctggctggttcgccagcacctgttgatgtcggtgaccgcccaacgccgcgatattcaggacccggaagtcatcaagcagtttgccgaagaagtgcaaacggaaaatcgtctgcgctatctggtatgcctgactgtggctgacatttgcgccaccaacgaaacgctgtggaatagctggaagcaaagtctgttgcgtgagctctactttgccaccgaaaagcagctacgacgcggaatgcaaaacacgccggatatgcgcgaacgggttcgccatcaccaactccaggcactggcactactgcgcatggataacatcgacgaagaggcgctgcaccaaatttggtcacgctgtcgtgctaactattttgtccgccatagcccaaatcaactggcctggcatgcccgccatttattacagcatgatttaagcaaaccgctggtattgcttagcccgcaggctacgcgtggaggcaccgagatttttatctggagcccggaccgcccttatctgtttgccgccgtctgtgccgaattagaccgccgcaatttaagtgttcacgacgcacaaattttcaccactcgcgacggtatggcgatggatacctttatcgtgctggaacccgatggcaacccgctgtccgcagatcgtcatgaggttattcggtttggtctggagcaagtactgacgcaaagtagctggcagccaccgcagccccgtcgccaacccgccaaattacgccattttactgttgaaaccgaagtaacgtttttgccgacccataccgaccgcaaatcgttcctcgaactgatcgccctcgaccaacctggactgctggcgcgagtcgggaaaatttttgccgatctgggaatttcgcttcatggtgcccgaattacaaccattggcgagcgagtagaagatttattcataattgccaccgctgaccggcgtgcgcttaataacgagttgcagcaggaagtgcatcagcggttgacagaggccctcaatccaaacgataaagggtga

SEQ ID NO: 16 - protein, 14 aa, Escherichia coli
MKPLSSPLQQYWQT

SEQ ID NO: 17 - DNA, 538 bp, Escherichia coli
ctcggtttgagttaatcgccaattaaaaaggttaatgacatgcgagagacagtcgaaattttgacggctagctcagtcctaggtacagtgctagctaagtaggtacgtaaggaggtgataaatgcgttatcccgtcactcttacacccgcgccggaaggcggttatatggtttcttttgtggatatccctgaagcgttgacccagggcgaaactgtcgctgaagcgatggaagcggcaaaagatgctttactgaccgcatttgatttttattttgaagataacgagcttatccctttaccttcgccattaaatagtcacgatcactttattgaagtacctttgagcgtcgcctctaaggtattgctgttaaatgcttttttacagtcagaaatcactcagcaagagttagccaggcgaattggcaaacctaaacaggagattactcgcctatttaacttgcatcatgcgacaaaaatcgacgccgtccagctcgcggcaaaggcgcttggcaaagagttatcgctggtgatggtttaa

SEQ ID NO: 18 - DNA, 2401 bp, Escherichia coli
tgggcaggggctgttgcccacacactttatttgtgaacgttacgtgaaaggaacaaccaattgacggctagctcagtcctaggtacagtgctagctaagtaggtacgtaaggaggtgataaatggatgaccagttaaaacaaagtgcacttgatttccatgaatttccagttccagggaaaatccaggtttctccaaccaagcctctggcaacacagcgcgatctggcgctggcctactcaccaggcgttgccgcaccttgtcttgaaatcgaaaaagacccgttaaaagcctacaaatataccgcccgaggtaacctggtggcggtgatctctaacggtacggcggtgctggggttaggcaacattggcgcgctggcaggcaaaccggtgatggaaggcaagggcgttctgtttaagaaattcgccgggattgatgtatttgacattgaagttgacgaactcgacccggacaaatttattgaagttgtcgccgcgctcgaaccaaccttcggcggcatcaacctcgaagacattaaagcgccagaatgtttctatattgaacagaaactgcgcgagcggatgaatattccggtattccacgacgatcagcacggcacggcaattatcagcactgccgccatcctcaacggcttgcgcgtggtggagaaaaacatctccgacgtgcggatggtggtttccggcgcgggtgccgcagcaatcgcctgtatgaacctgctggtagcgctgggtctgcaaaaacataacatcgtggtttgcgattcaaaaggcgttatctatcagggccgtgagccaaacatggcggaaaccaaagccgcatatgcggtggtggatgacggcaaacgtaccctcgatgatgtgattgaaggcgcggatattttcctgggctgttccggcccgaaagtgctgacccaggaaatggtgaagaaaatggctcgtgcgccaatgatcctggcgctggcgaacccggaaccggaaattctgccgccgctggcgaaagaagtgcgtccggatgccatcatttgcaccggtcgttctgactatccgaaccaggtgaacaacgtcctgtgcttcccgttcatcttccgtggcgcgctggacgttggcgcaaccgccatcaacgaagagatgaaactggcggcggtacgtgcgattgcagaactcgcccatgcggaacagagcgaagtggtggcttcagcgtatggcgatcaggatctgagctttggtccggaatacatcattccaaaaccgtttgatccgcgcttgatcgttaagatcgctcctgcggtcgctaaagccgcgatggagtcgggcgtggcgactcgtccgattgctgatttcgacgtctacatcgacaagctgactgagttcgtttacaaaaccaacctgtttatgaagccgattttctcccaggctcgcaaagcgccgaagcgcgttgttctgccggaaggggaagaggcgcgcgttctgcatgccactcaggaactggtaacgctgggactggcgaaaccgatccttatcggtcgtccgaacgtgatcgaaatgcgcattcagaaactgggcttgcagatcaaagcgggcgttgattttgagatcgtcaataacgaatccgatccgcgctttaaagagtactggaccgaatacttccagatcatgaagcgtcgcggcgtcactcaggaacaggcgcagcgggcgctgatcagtaacccgacagtgatcggcgcgatcatggttcagcgtggggaagccgatgcaatgatttgcggtacggtgggtgattatcatgaacattttagcgtggtgaaaaatgtctttggttatcgcgatggcgttcacaccgcaggtgccatgaacgcgctgctgctgccgagtggtaacacctttattgccgatacatatgttaatgatgaaccggatgcagaagagctggcggagatcaccttgatggcggcagaaactgtccgtcgttttggtattgagccgcgcgttgctttgttgtcgcactccaactttggttcttctgactgcccgtcgtcgagcaaaatgcgtcaggcgctggaactggtcagggaacgtgcaccagaactgatgattgatggtgaaatgcacggcgatgcagcgctggtggaagcgattcgcaacgaccgtatgccggacagctctttgaaaggttccgccaatattctggtgatgccgaacatggaagctgcccgcattagttacaacttactgcgtgtttccagctcggaaggtgtgactgtcggcccggtgctgatgggtgtggcgaaaccggttcacgtgttaacgccgatcgcatcggtgcgtcgtatcgtcaacatggtggcgctggccgtggtagaagcgcaaacccaaccgctgtaa

SEQ ID NO: 19 - protein, 127 aa, Escherichia coli
MSRRNTDAITIHSILDWIEDNLESPLSLEKVSERSGYSKWHLQRMFKKETGHSLGQYIRSRKMTEIAQKLKESNEPILYLAERYGFESQQTLTRTFKNYFDVPPHKDRMTNMQGESRFLHPLNHYNS

SEQ ID NO: 20 - protein, 810 aa, Escherichia coli
MSVIAQAGAKGRQLHKFGGSSLADVKCYLRVAGIMAEYSQPDDMMVVSAAGSTTNQLINWLKLSQTDRLSAHQVQQTLRRYQCDLISGLLPAEEADSLISAFVSDLERLAALLDSGINDAVYAEVVGHGEVWSARLMSAVLNQQGLPAAWLDAREFLRAERAAQPQVDEGLSYPLLQQLLVQHPGKRLVVTGFISRNNAGETVLLGRNGSDYSATQIGALAGVSRVTIWSDVAGVYSADPEKVKDACLLPLLRLDEASELARLAAPVLHARTLQPVSGSEIDLQLRCSYTPDQGSTRIERVLASGTGARIVTSHDDVCLIEFQVPASQDFKLAHKEIDQILKRAQVRPLAVGVHNDRQLLQFCYTSEVADSALKILDEAGLPGELRLRQGLALVAMVGAGVTRNPLHCHRFWQQLKGQPVEFTWQSDDGISLVAVLRTGPTESLIQGLHQSVFRAEKRIGLVLFGKGNIGSRWLELFAREQSTLSARTGFEFVLAGVVDSRRSLLSYDGLDASRALAFFNDEAVEQDEESLFLWMRAHPYDDLVVLDVTASQQLADQYLDFASHGFHVISANKLAGASDSNKYRQIHDAFEKTGRHWLYNATVGAGLPINHTVRDLIDSGDTILSISGIFSGTLSWLFLQFDGSVPFTELVDQAWQQGLTEPDPRDDLSGKDVMRKLVILAREAGYNIEPDQVRVESLVPAHCEGGSIDHFFENGDELNEQMVQRLEAAREMGLVLRYVARFDANGKARVGVEAVREDHPLASLLPCDNVFAIESRWYRDNPLVIRGPGAGRDVTAGAIQSDINRLAQLL

SEQ ID NO: 21 - protein, 4 aa, Escherichia coli
MPEQ

SEQ ID NO: 22 - protein, 4 aa, Escherichia coli
MDVM

SEQ ID NO: 23 - protein, 540 aa, Escherichia coli
MRVNNGLTPQELEAYGISDVHDIVYNPSYDLLYQEELDPSLTGYERGVLTNLGAVAVDTGIFTGRSPKDKYIVRDDTTRDTFWWADKGKGKNDNKPLSPETWQHLKGLVTRQLSGKRLFVVDAFCGANPDTRLSVRFITEVAWQAHFVKNMFIRPSDEELAGFKPDFIVMNGAKCTNPQWKEQGLNSENFVAFNLTERMQLIGGTWYGGEMKKGMFSMMNYLLPLKGIASMGCSANVGEKGDVAVFFGLSGTGKTTLSTDPKRRLIGDDEHGWDDDGVFNFEGGCYAKTIKLSKEAEPEIYNAIRRDALLENVTVREDGTIDFDDGSKTENTRVSYPIYHIDNIVKPVSKAGHATKVIFLTADAFGVLPPVSRLTADQTQYHFLSGFTAKLAGTERGITEPTPTFSACFGAAFLSLHPTQYAEVLVKRMQAAGAQAYLVNTGWNGTGKRISIKDTRAIIDAILNGSLDNAETFTLPMFNLAIPTELPGVDTKILDPRNTYASPEQWQEKAETLAKLFIDNFDKYTDTPAGAALVAAGPKL

SEQ ID NO: 24 - DNA, 811 bp, Escherichia coli
tctgacgcataatgacgtcgcattaatgatcgcaacctatttattacaacagggcaaatcttgacggctagctcagtcctaggtacagtgctagctaagtaggtacgtaaggaggtgataaatggcgagacgtattctggtcgtagaagatgaagctccaattcgcgaaatggtctgcttcgtgctcgaacaaaatggctttcagccggtcgaagcggaagattatgacagtgctgtgaatcaactgaatgaaccctggccggatttaattctcctcgactggatgttacctggcggctccggtatccagttcatcaaacacctcaagcgcgagtcgatgacccgggatattccagtggtgatgttgaccgccagaggggaagaagaagatcgcgtgcgcggccttgaaaccggcgcggatgactatatcaccaagccgttttcgccgaaggagctggtggcgcgaatcaaagcggtaatgcgccgtatttcgccaatggcggtggaagaggtgattgagatgcagggattaagtctcgacccgacatctcaccgagtgatggcgggcgaagagccgctggagatggggccgacagaatttaaactgctgcacttttttatgacgcatcctgagcgcgtgtacagccgcgagcagctgttaaaccacgtctggggaactaacgtgtatgtggaagaccgcacggtcgatgtccacattcgtcgcctgcgtaaagcactggagcccggcgggcatgaccgcatggtgcagaccgtgcgcggtacaggatatcgtttttcaacccgcttttaa

SEQ ID NO: 25 - DNA, 1159 bp, Escherichia coli
ctgttagaattgcgccgaattttatttttctaccgcaagtaacgcgtggggacccaagcattgacggctagctcagtcctaggtacagtgctagctaagtaggtacgtaaggaggtgataagtgaccgataaaacctctcttagctacaaagatgccggtgttgatattgacgcgggtaatgctctggttggaagaatcaaaggcgtagtgaagaaaacgcgtcgtccggaagtgatgggcggtctgggcggcttcggtgcgctgtgtgcattgccgcaaaaatatcgtgaacccgtgctggtttctggcactgacggcgtaggtaccaagctgcgtctggcaatggacttaaaacgtcacgacaccattggtattgatctggtcgccatgtgcgttaatgacctggtggtgcaaggtgcagagccgctgtttttcctcgactattacgcaaccggaaaactggatgttgataccgcttcagcggtgatcagcggcattgcggaaggttgtctgcaatcaggctgttcactggtgggtggcgaaacggcagaaatgccggggatgtatcacggtgaggattacgatgtcgcgggtttctgcgttggcgtggtagaaaaatcagaaatcatcgacggctctaaagtcagcgacggcgatgtgctgattgcactcggttccagcggtccacactcgaacggctattcgctggtgcgcaaaattcttgaagtcagcggttgtgatccgcaaaccaccgaacttgatggtaagccattagccgatcatctgctggcaccgacccgcatttacgtgaagtcagtgctggagttgattgaaaaggtcgatgtgcatgccattgcgcacctgaccggcggcggcttctgggaaaacattccgcgcgtattgccagataatactcaggcagtgattgatgaatcttcctggcagtggccggaagtgttcaactggctgcaaacggcaggtaacgttgagcaccatgaaatgtatcgcaccttcaactgcggcgtcgggatgattattgccctgcctgctccggaagtggacaaagccctcgccctgctcaatgccaacggtgaaaacgcgtggaaaatcggtatcatcaaagcctctgattccgaacaacgcgtggttatcgaataa

SEQ ID NO: 26 - protein, 4 aa, Escherichia coli
MNSL

SEQ ID NO: 27 - protein, 4 aa, Escherichia coli
MNTN

SEQ ID NO: 28 - DNA, 703 bp, Escherichia coli
ctgttgtcgcctgctctggattaacggataataggcggcttttttatttcaggccgaaaattgacggctagctcagtcctaggtacagtgctagctaagtaggtacgtaaggaggtgataaatgactgactacctgttactgtttgtcggaactgtactggtcaataactttgtactggtcaagtttctcggtctctgtccgtttatgggggtttccaaaaaactggaaaccgcgatgggcatggggctggcaacaacgtttgtgatgacgctggcgtctatttgcgcctggcttatcgatacgtggattttgatcccacttaatctgatttacctgcgcaccctggcatttattctggtgattgctgtggtcgtgcagttcaccgagatggtggtgcgcaaaaccagcccggtgctttaccgtctgctggggatttttttgccgcttatcaccaccaactgtgcagtgctcggcgtggcgttgctgaatatcaatctcgggcacaatttcttgcagtcggcgctgtacggtttttccgccgctgtcggtttctcgctggtgatggtgctcttcgccgccatccgcgaacgccttgctgtggctgatgtcccggcaccttttcgcggtaatgccattgcgttaattaccgcaggtcttatgtctctggcctttatgggctttagtggtttggtgaagttgtaa

SEQ ID NO: 29 - DNA, 1480 bp, Escherichia coli
aaagatgcggcaagtgaatttgccgcaattgctacctttttagcaaatccgaggcacctattgacggctagctcagtcctaggtacagtgctagctaagtaggtacgtaaggaggtgataaatggaacaatatgatcaaattggcgcaagactggaccgcttgcctttggcccggtttcattatcgtatatttggtattataagctttagtctgttattaacagggtttttgagttactccggtaatgtcgtcttagcaaagctggtaagcaatggatggtcaaataatttcctcaatgccgcctttacctcggcattaatgtttggttatttcatcggctcacttactggtgggtttattggtgactactttgggcggcgcagggcgtttcgcataaatcttctcatcgtcggtattgctgcaacaggggccgcttttgtccctgatatgtactggctcatcttctttcgcttcctgatgggaacaggaatgggggcgctgattatggttggctatgcctcatttacggagtttatccccgcgacggtgcgtggaaaatggtccgcgcggctctcatttgttggtaactggtcgcccatgctgtctgcggcgataggcgtggtggttatcgctttttttagttggcgaataatgtttctgctgggtggtattggcatactgttagcctggtttctctcaggtaaatactttatcgagtcgccacgatggctggcagggaaagggcaaatcgcaggtgcagaatgccaacttcgtgaagtagagcagcaaattgaaagagagaagagtattcgtttacccccgcttacttcgtatcagagcaacagcaaggttaaagtaatcaagggtactttctggctcctgtttaaaggtgaaatgttacgacgtacattagtcgcgattactgttttaattgcaatgaacatttcgctttataccatcaccgtatggataccgaccatatttgttaactccggcattgatgtcgataaatcaatattaatgaccgctgttattatgattggcgctccggtaggaatatttattgcggcattaattattgatcattttcctcgtcggttatttggctccaccttacttattattattgccgtgttaggctatatctattcaattcagactacagagtgggcgattttaatctatggactggtgatgatcttctttttatacatgtatgtttgcttcgcgtcggcggtttatatcccggagctttggccaacgcatttacgcctgcgcggttcgggtttcgttaatgccgtcggacggatcgtcgcagtcttcacgccctatggcgttgcggcattattaacacattatgggtcgatcacggtgtttatggtacttggtgttatgttattgctctgtgcgctggttctctccatttttggcatcgaaacgcggaaggtgtcgttggaagagatttctgaggtgaattaa

SEQ ID NO: 30 - DNA, 2470 bp, Escherichia coli
caagggacaatttttgcagcggcacagcgttcagatagttattttgttaaatgtattaacttgacggctagctcagtcctaggtacagtgctagctaagtaggtacgtaaggaggtgataaatgctgagtttatacgaaaagataaagataaggctgataattttatttttattggcagcactgtcatttattggtctttttttcatcattaactatcaactggtatcggagcgcgcggtaaaacgtgccgatagccgctttgaacttattcagaaaaacgttggctatttctttaaagatattgaacgttcggccctgacattaaaggactcactgtatttattaaaaaatacagaggagattcaacgcgccgtgattcttaaaatggaaatgatgccatttttagactcggtgggactggtacttgatgataataaatattatcttttttcgcggagggcgaatgataaaatcgttgtttatcatcaggaacaagtaaatggaccgcttgtcgacgagtcagggcgggttatttttgccgattttaacccatcgaaacgaccgtggtcggtggcttcagatgactctaacaacagctggaatccggcatacaattgctttgatcgtccgggtaaaaaatgtatctcttttacgctacacatcaacggcaaagatcacgatttgttagcggtggataaaattcatgtcgatttaaactggcgatatctgaacgagtatcttgatcaaatcagcgctaatgatgaagttctatttttgaaacaaggccatgagatcattgccaagaatcaactcgctcgtgaaaaactgattatttataatagcgaaggtaattataatattattgattctgtcgatactgaatatatcgaaaaaacatcagcggtgccaaacaacgcattattcgaaatctatttttattatcctggcggtaatttattgaacgcatcagataaacttttttatctgccgtttgcgttcattattatcgtattgctggtggtttatttaatgaccactcgtgtgttccgtcggcaattttctgaaatgacagagctggttaatacgctggcgtttttgcctgactcaacggatcaaatcgaggctctgaaaattcgtgaaggcgatgcgaaagagattatcagcatcaaaaattcgatcgcggaaatgaaagatgccgaaattgaacggtcaaataaattgctctcactgatctcttacgatcaggaaagtggttttattaaaaatatggcgattattgagtctaacaataatcagtatctggctgtggggatcatcaaactgtgtggtctggaagccgtggaagcggtgtttggtgttgatgagcgcaataaaatcgtcaggaaattgtgtcagcgaattgccgagaaatatgcgcaatgctgcgatatcgtgacattcaatgccgatctctatttacttctgtgtcgggaaaatgtacagacatttacccgtaaaatagcgatggtaaacgattttgacagcagctttggctaccgcaatctgcgcatccataagtctgccatttgtgaacctttgcagggggaaaacgcctggagttacgcagaaaaactgaaactggcgatttccagtatccgtgaccatatgttctcagagtttattttctgtgatgacgcgaaactcaacgaaatagaagagaatatctggattgcgcgtaatattcgccatgcaatggaaattggcgaactattcctcgtctatcaaccgatcgttgatattaacacccgcgccattctgggcgcggaggcgttgtgccgttgggtgtctgcggagcgggggatcatttcaccgctgaagttcattaccattgctgaagatatcgggtttatcaatgagctgggttatcagattattaaaacggcaatgggtgaattcagacattttagtcagcgtgcgtcgctgaaggatgatttcttactgcatattaatgtttcgccctggcagttaaacgaaccacactttcatgagcgttttaccaccatcatgaaagaaaatggcctgaaggcgaacagcctctgtgttgagatcactgaaaccgtgatcgagcgaattaatgaacatttttatctcaatattgaacaactgcgtaaacaaggggtacggatatcgattgatgactttggcaccggtttgtcaaacctgaaacgtttttatgaaattaatccagacagcataaaggtggactcgcaattcaccggcgatattttcggtactgcgggaaaaattgtgcgcattattttcgacctggcacgctataaccggatcccggtgattgcggaaggcgtagagagcgaagacgttgcgcgcgaattaatcaaattaggatgtgttcaggctcaggggtatctgtaccagaaacccatgccattctccgcctgggataaaagtggaaaattagtaaaagagtag

SEQ ID NO: 31 - DNA, 883 bp, Escherichia coli
aacgctgatgatatgcgccttctatacttaacgtttattcagcgttaagtggagaactcgttgacggctagctcagtcctaggtacagtgctagctaagtaggtacgtaaggaggtgataaatggcacaggttgcgattattaccgcctccgattcggggatcggcaaagagtgcgcgttattactggcgcagcaggggtttgatattggtattacctggcactcagatgaagaaggggcaaaagataccgcgcgtgaggtagttagccacggcgtacgtgcggagatcgtgcagctggatctcggcaatctaccagaaggggcactggcgctggagaaactcattcaacggctggggcgcattgatgtgctggtgaataatgcgggtgcaatgaccaaagcgccgtttcttgatatggcttttgatgagtggcgcaagatttttaccgttgatgtcgatggtgcattcttatgctcgcaaattgcggctcgtcagatggtgaaacaagggcagggcggtcgcatcatcaacattacgtcggtacatgaacatacgccgctgccggatgccagcgcctacacagccgctaaacatgcgctcggtgggttaaccaaagcgatggcgctggagctggtcaggcataagattttggtgaacgcagtcgcgcctggggcgatcgccacgccaatgaatggcatggatgacagcgacgtgaagcccgacgcggagccttcgattcccttgcggcgttttggcgcaacgcatgagattgccagcctggtggtgtggctttgttcggagggcgcaaattacaccaccgggcagtcgttgatagtggatggcggctttatgttggcgaatccacagttcaacccagaatag

SEQ ID NO: 32 - protein, 14 aa, Escherichia coli
MRIFVYGSLRHKQG

SEQ ID NO: 33 - protein, 93 aa, Escherichia coli
MSRRNTDAITIHSILDWIEDNLESPLSLEKVSERSGYSKWHLQRMFKKETGHSLGQYIRSRKMTEIAQKLKESNEPILYLAERYGFESQQTLT

SEQ ID NO: 34 - protein, 127 aa, Escherichia coli
MSRRNTDAITIHSILDWIEDNLESPLSLEKVSERSGYSKWHLQRMFKKETGHSLGQYIRSRKMTEIAQKLKESNEPILYLAERYGFESQQTLTRTFKNYFDVPPHKKRMTNMQGESRFLHPLNHYNS

SEQ ID NO: 35 - protein, 810 aa, Escherichia coli
MSVIAQAGAKGRQLHKFGGSSLADVKCYLRVAGIMAEYSQPDDMMVVSAAGSTTNQLINWLKLSQTDRLSAHQVQQTLRRYQCDLISGLLPAEEADSLISAFVSDLERLAALLDSGINDAVYAEVVGHGEVWSARLMSAVLNQQGLPAAWLDAREFLRAERAAQPQVDEGLSYPLLQQLLVQHPGKRLVVTGFISRNNAGETVLLGRNGSDYSATQIGALAGVSRVTIWSDVAGVYSADDRKVKDACLLPLLRLDEASELARLAAPVLHARTLQPVSGSEIDLQLRCSYTPDQGSTRIERVLASGTGARIVTSHDDVCLIEFQVPASQDFKLAHKEIDQILKRAQVRPLAVGVHNDRQLLQFCYTSEVADSALKILDEAGLPGELRLRQGLALVAMVGAGVTRNPLHCHRFWQQLKGQPVEFTWQSDDGISLVAVLRTGPTESLIQGLHQSVFRAEKRIGLVLFGKGNIGSRWLELFAREQSTLSARTGFEFVLAGVVDSRRSLLSYDGLDASRALAFFNDEAVEQDEESLFLWMRAHPYDDLVVLDVTASQQLADQYLDFASHGFHVISANKLAGASDSNKYRQIHDAFEKTGRHWLYNATVGAGLPINHTVRDLIDSGDTILSISGIFSGTLSWLFLQFDGSVPFTELVDQAWQQGLTEPDPRDDLSGKDVMRKLVILAREAGYNIEPDQVRVESLVPAHCEGGSIDHFFENGDELNEQMVQRLEAAREMGLVLRYVARFDANGKARVGVEAVREDHPLASLLPCDNVFAIESRWYRDNPLVIRGPGAGRDVTAGAIQSDINRLAQLL

SEQ ID NO: 36 - protein, 810 aa, Escherichia coli
MSVIAQAGAKGRQLHKFGGSSLADVKCYLRVAGIMAEYSQPDDMMVVSAAGSTTNQLINWLKLSQTDRLSAHQVQQTLRRYQCDLISGLLPAEEADSLISAFVSDLERLAALLDSGINDAVYAEVVGHGEVWSARLMSAVLNQQGLPAAWLDAREFLRAERAAQPQVDEGLSYPLLQQLLVQHPGKRLVVTGFISRNNAGETVLLGRNGSDYSATQIGALAGVSRVTIWSDVAGCYSADPRKVKDACLLPLLRLDEASELARLAAPVLHARTLQPVSGSEIDLQLRCSYTPDQGSTRIERVLASGTGARIVTSHDDVCLIEFQVPASQDFKLAHKEIDQILKRAQVRPLAVGVHNDRQLLQFCYTSEVADSALKILDEAGLPGELRLRQGLALVAMVGAGVTRNPLHCHRFWQQLKGQPVEFTWQSDDGISLVAVLRTGPTESLIQGLHQSVFRAEKRIGLVLFGKGNIGSRWLELFAREQSTLSARTGFEFVLAGVVDSRRSLLSYDGLDASRALAFFNDEAVEQDEESLFLWMRAHPYDDLVVLDVTASQQLADQYLDFASHGFHVISANKLAGASDSNKYRQIHDAFEKTGRHWLYNATVGAGLPINHTVRDLIDSGDTILSISGIFSGTLSWLFLQFDGSVPFTELVDQAWQQGLTEPDPRDDLSGKDVMRKLVILAREAGYNIEPDQVRVESLVPAHCEGGSIDHFFENGDELNEQMVQRLEAAREMGLVLRYVARFDANGKARVGVEAVREDHPLASLLPCDNVFAIESRWYRDNPLVIRGPGAGRDVTAGAIQSDINRLAQLL

SEQ ID NO: 37 - protein, 540 aa, Escherichia coli
MRVNNGLTPQELEAYGISDVHDIVYNPSYDLLYQEELDPSLTGYERGVLTNLGAVAVDTGIFTDRSPKDKYIVRDDTTRDTFWWADKGKGKNDNKPLSPETWQHLKGLVTRQLSGKRLFVVDAFCGANPDTRLSVRFITEVAWQAHFVKNMFIRPSDEELAGFKPDFIVMNGAKCTNPQWKEQGLNSENFVAFNLTERMQLIGGTWYGGEMKKGMFSMMNYLLPLKGIASMHCSANVGEKGDVAVFFGLSGTGKTTLSTDPKRRLIGDDEHGWDDDGVFNFEGGCYAKTIKLSKEAEPEIYNAIRRDALLENVTVREDGTIDFDDGSKTENTRVSYPIYHIDNIVKPVSKAGHATKVIFLTADAFGVLPPVSRLTADQTQYHFLSGFTAKLAGTERGITEPTPTFSACFGAAFLSLHPTQYAEVLVKRMQAAGAQAYLVNTGWNGTGKRISIKDTRAIIDAILNGSLDNAETFTLPMFNLAIPTELPGVDTKILDPRNTYASPEQWQEKAETLAKLFIDNFDKYTDTPAGAALVAAGPKL

SEQ ID NO: 38 - DNA, 1303 bp, Escherichia coli
tgtttattttctgacaagcagcgtaaactccgcgtcttcctcttccagtgatcgaccagcttgacggctagctcagtcctaggtacagtgctagctaagtaggtacgtaaggaggtgataaatgcataactcccccgcagtctccagcgcgaaatcgtttgacctgacctcgacggcgtttttaatcgttgcctttctcaccggtattgcgggcgctctgcaaaccccgacactcagtatttttcttaccgatgaagtacatgcccgtccggcgatggtgggattcttctttaccggcagcgctgtcattgggattctggtaagtcagtttctcgccgggcgctctgataagcgcggcgatcgcaaatcgctgattgtcttttgctgcctgttaggcgtgctggcctgcaccctttttgcctggaatcgcaactactttgttttgctattcgttggcgtctttcttagcagctttggctcgaccgctaacccgcaaatgtttgcccttgcccgtgaacatgccgacaaaaccggacgtgaggcggtgatgttcagctcttttttacgcgctcaggtttcactggcatgggtcattggcccaccgctggcttatgccttagcgatgggtttcagctttacggtaatgtatctgagcgcagcggtagcgtttattgtttgcggtgtgatggtgtggctgtttttaccgtcgatgcgaaaagagcttccgctggcgaccggcacgatcgaagcgccgcgccgtaaccgtcgcgatacgctgctgctgtttgtcatttgtacattgatgtggggctcgaacagcctgtacatcatcaacatgccgctatttattatcaacgaactgcatcttcccgagaaactggccggtgtgatgatggggaccgccgccgggctggaaatcccgacgatgttgattgccggatatttcgccaaacgtctgggtaagcgtttcttaatgcgcgttgctgccgtgggtggcgtctgtttttacgcaggaatgctgatggcgcattcacctgtcattctgttgggcttgcagctgctaaatgctatttttattggcattctgggcggcatcgggatgctctattttcaggatctgatgcccggtcaggcgggttcagccaccacgctctataccaacacttcgcgcgtgggctggatcatcgcaggatcagtggcgggcatcgtcgccgagatctggaattatcacgctgtgttctggtttgcgatggtgatgattatcgccactctgttttgcttactgcggattaaagatgtttaa

SEQ ID NO: 39 - DNA, 532 bp, Escherichia coli
tgaagcaatttagataatcgtgcagactacgccccctcatatcacatggaaggtttatctttgacggctagctcagtcctaggtacagtgctagctaagtaggtacgtaaggaggtgataaatggatcaggtagtcatttttaaacaaatatttgataaagttcgaaacgatttaaactatcaatggttttattctgagctaaaacgtcacaatgtctcacattacatttactatttagccacagagaatgttcatattgtattaaaaaatgataatacagtgttattaaagggcctaaaaaacattgtgtctgtcaaattttcaaaggataggcatcttatagaaacgacctctaataagctgaaatccagagagatcacatttcaggaatacagaagaaaccttgctaaagcaggagtttttcggtgggttacaaatatccacgaacaaaaaagatattactatacctttgataattcattactatttactgaaagcatccagaaaactacacagatcttaccacgctaa

SEQ ID NO: 40 - DNA, 943 bp, Escherichia coli
cgtctatagtatttatgagggtttgcttttaataatcataattacccaccagagtgtgatttgacggctagctcagtcctaggtacagtgctagctaagtaggtacgtaaggaggtgataaatgcgtacaaccattgctgtagtgttgggtgcaattagtttgacgtctgcttttgtgtttgcagataaaccagacgttgccagatcggcaaacgatgaggtcagcaccctgttttttggtcatgatgatcgtgtgccagtgaatgacacgacccaatcaccgtgggatgcggttgggcaactggaaacggccagcggcaatttatgtacggcgacgctgattgcacccaatctggcattaacggcaggacactgtttattgacacctccaaagggtaaagccgataaagcagtggcgctgcgttttgtgtcaaataaaggtctttggcgctatgagatccacgacatagaaggccgcgttgatccgacactgggaaagcggttaaaagcagatggggatggttggattgtacctcccgcagccgcgccgtgggacttcggattgattgtgctacgtaatcccccttctggcattacgccgttgccgttatttgagggagataaagccgcgcttaccgccgcattaaaagcggcaggtcgtaaagtgactcaggcaggctaccctgaagatcatctcgatacgttgtacagtcatcaaaactgtgaagtgactggctgggcgcaaacgtcggtgatgtcacatcagtgcgataccttgccgggtgacagcggttcgcctctgatgttgcataccgatgacggctggcaattaattggggtgcaaagttcggctcctgccgcgaaagatcgctggcgcgccgataaccgggccatttctgttaccggttttcgcgacaagctggatcaactgtcgcaaaaataa

SEQ ID NO: 41 - DNA, 466 bp, Escherichia coli
atgatgtgttaaaattgatgtaaacaaattgtgaagtgaatgtgcttccggggaaaataattgacggctagctcagtcctaggtacagtgctagctaagtaggtacgtaaggaggtgataagtgacttcattacaactctcaatcgtccatcgactgccgcagaactatcgctggtctgctggtttcgcaggttcgaaggttgaaccgattccgcaaaatggaccgtgcggtgacaacagcctggtggcgcttaaattgcttagcccggatggtgataatgcatggtcggtgatgtataaactaagccaggcgttaagcgacatcgaagttccatgttcggtgctggagtgtgaaggtgagccgtgcctgtttgtaaatcgccaggacgagtttgctgcaacatgccgattgaaaaattttggtgtggcaattgccgaacccttttcaaactacaatcctttttaa

SEQ ID NO: 42 - DNA, 767 bp, Escherichia coli
ataggcttcgatttattgcgctatctctgtggcaggattgtgaataaagtgtcaacaagcaacggggcatcgcccattcaaacatctataaggaaacaccttgacggctagctcagtcctaggtacagtgctagctaagtaggtacgtaaggaggtgataaatgagcaaggtattagttcttaaatccagcatcctggcagggtactctcagtctaatcagttgtccgattattttgttgaacaatggcgcgaaaagcactccgctgatgaaatcaccgttcgcgacctggctgcaaatccgattccggtactggatggcgaactggttggcgctctgcgtccgagcgatgcgccgctgactccgcgtcagcaggaagctctggcactttccgatgagttgattgccgagctgaaagcccacgacgttatcgttattgcggcaccgatgtataacttcaacatctcgactcagttgaaaaactattttgacctggttgcccgcgcaggcgttactttccgctataccgagaacggtccggaaggtctggtaacgggtaaaaaagccatcgttattaccagccgcggcgggatccacaaagatggaccaacggacctggtgacgccgtatctgtccacgttcctcggctttatcggcattaccgatgtgaaatttgtcttcgccgaagggatcgcatacggtccggaaatggcagcgaaagcacagtctgacgcaaaagcagccatcgacagcattgtttctgcataa

SEQ ID NO: 43 - protein, 334 aa, Escherichia coli
VKLDAIARLAGVSRTTASYVINGKAKQYRVSDKTVEKVMAVVREHNYHPNAVAAGLRAGRTRSIGLVIPDLENTSYTRIANYLERQARQRGYQLLIACSEDQPDNEMRCIEHLLQRQVDAIIVSTSLPPEHPFYQRWANDPFPIVALDRALDREHFTSVVGADQDDAEMLAEELRKFPAETVLYLGALPELSVSFLREQGFRTAWKDDPREVHFLYANSYEREAAAQLFEKWLETHPMPQALFTTSFALLQGVMDVTLRRDGKLPSDLAIATFGDNELLDFLQCPVLAVAQRHRDVAERVLEIVLASLDEPRKPKPGLTRIKRNLYRRGVLSRS

SEQ ID NO: 44 - protein, 333 aa, Escherichia coli
VKLDESRLAGVSRTTASYVINGKAKQYRVSDKTVEKVMAVVREHNYHPNAVAAGLRAGRTRSIGLVIPDLENTSYTRIANYLERQARQRGYQLLIACSEDQPDNEMRCIEHLLQRQVDAIIVSTSLPPEHPFYQRWANDPFPIVALDRALDREHFTSVVGADQDDAEMLAEELRKFPAETVLYLGALPELSVSFLREQGFRTAWKDDPREVHFLYANSYEREAAAQLFEKWLETHPMPQALFTTSFALLQGVMDVTLRRDGKLPSDLAIATFGDNELLDFLQCPVLAVAQRHRDVAERVLEIVLASLDEPRKPKPGLTRIKRNLYRRGVLSRS

SEQ ID NO: 45 - protein, 333 aa, Escherichia coli
VKLDEIARLAGVSRTTALVINGKAKQYRVSDKTVEKVMAVVREHNYHPNAVAAGLRAGRTRSIGLVIPDLENTSYTRIANYLERQARQRGYQLLIACSEDQPDNEMRCIEHLLQRQVDAIIVSTSLPPEHPFYQRWANDPFPIVALDRALDREHFTSVVGADQDDAEMLAEELRKFPAETVLYLGALPELSVSFLREQGFRTAWKDDPREVHFLYANSYEREAAAQLFEKWLETHPMPQALFTTSFALLQGVMDVTLRRDGKLPSDLAIATFGDNELLDFLQCPVLAVAQRHRDVAERVLEIVLASLDEPRKPKPGLTRIKRNLYRRGVLSRS

SEQ ID NO: 46 - DNA, 1664 bp, Escherichia coli
ctgccgtttcccctcccactataacaattgcgcgtatgttttttatacataacgcgagaaagcacccccgttaatatgggatgtaaaaaaagaggtaaaattgacggctagctcagtcctaggtacagtgctagctaagtaggtacgtaaggaggtgataagtgtccactgcaaaccaaaaaccaactgaaagcgtcagtttgaacgctttcaaacaaccgaaggcgttctatctcatcttctcgattgagttatgggaacgttttggttattacggcctacaaggaattatggctgtttacctggttaaacaactgggtatgtctgaagcggattcaatcacccttttctcttcctttagtgccctggtttatggtctggtcgctatcggcggctggttaggtgacaaggtactgggtactaaacgcgtaattatgctcggcgctattgtgctggcgattggttatgctctggttgcctggtctggtcacgacgccggtatcgtttatatgggtatggcggctattgcggtcggtaacggcctgtttaaagctaacccgtcttctctgctttctacatgctatgagaaaaacgacccgcgtctggacggtgcattcaccatgtactacatgtccgtcaacatcggctctttcttctctatgattgctacgccgtggctggccgcgaaatacggctggagtgttgcgtttgcgttgagcgttgtaggcctgctgatcactatcgttaacttcgccttctgccaacgctgggttaaacagtacggttcaaaaccagacttcgagcctatcaactaccgtaacctgctgctgaccattattggtgttgtggcactgatcgctatcgccacctggctgctgcacaatcaggaagttgcgcgtatggcgctgggcgttgttgccttcggtatcgtggttatcttcggtaaagaagccttcgcgatgaaaggtgctgcgcgtcgtaaaatgatcgttgccttcatcctgatgctcgaagccattatcttcttcgtgctgtacagccagatgccaacgtcactgaacttctttgcgattcgtaacgttgagcactccattctgggtctggccgtagaacctgagcagtatcaggcactgaacccgttctggatcatcatcggtagtccgattctggccgctatctataacaagatgggcgataccctgccgatgccaaccaagtttgcaatcggcatggtgatgtgttctggtgcgttcctgattctgccgctgggtgcgaaattcgcgtctgacgctggtatcgtgtctgtaagctggctggtcgcaagctatggcctgcagagcatcggggaactgatgatctctggtctgggtctggcaatggttgctcaactcgttccgcagcgtctgatgggcttcattatgggtagctggttcctgaccactgccggtgcaaacctgattggtggttatgttgcgggtatgatggctgtgccggataacgttaccgatccgctgatgtcactggaagtctatggtcgcgtattcttgcagattggtgtcgctactgccgttattgcagtactgatgctgctgaccgcgccgaaactgcaccgcatgacgcaggatgacgctgcagacaaagcggcgaaagcagccgtagcgtaa

SEQ ID NO: 47 - protein, 250 aa, Escherichia coli
MIPEKRIIRRIQSGGCAIHCQDCSISQLCIPFTLNEHELDQLDNIIERKKPIQKGQTLFKAGDELKSLYAIRSGTIKSYTITEQGDEQITGFHLAGDLVGFDAIGSGHHPSFAQALETSMVCEIPFETLDDLSGKMPNLRQQMMRLMSGEIKGDQDMILLLSKKNAEERLAAFIYNLSRRFAQRGFSPREFRLTMTRGDIGNYLGLTVETISALLGRFQKSGMLAVKGKYITIENNDALAQLAGHTRNVA

SEQ ID NO: 48 - DNA, 1655 bp, Escherichia coli
gaattaagttaagtgatagactatttcatcatttttttagctgctatgtacatagcgttaacgctgtgccatgaagcaacagcgaggagtgtagtcgcaattgacggctagctcagtcctaggtacagtgctagctaagtaggtacgtaaggaggtgataaatggcgaaagaaaaaaaacgtggctttttttcctggctgggctttggtcaaaaagagcagaccccggaaaaagagacagaagttcagaatgaacaaccggttgtagaagaaatcgttcaggcgcaagagcctgtgaaggcctctgaacaagccgttgaagagcagccgcaagcgcatactgaagccgaggcggaaacttttgctgccgacgttgtggaagtcactgaacaggttgctgaaagtgaaaaagcgcagcctgaagcggaagtcgttgcacagccggaaccggtcgtagaagaaacgccggagccagtggctatcgaacgtgaagagctgccgttgccggaagacgtcaacgccgaagcggtttcgccagaagagtggcaggctgaagcggaaaccgtagagattgtcgaagcggcggaagaagaagcggctaaagaagaaattaccgacgaagagctggaaacggcgctggctgccgaagcggcagaagaggcggtgatggtggttcctccggcagaagaagagcagccggtggaagaaatcgctcaggagcaggaaaaaccgaccaaagaaggttttttcgcgcgcctgaaacgcagcctgttaaaaaccaaagaaaatctcggttccggatttatcagcctgttccgcggtaaaaaaatcgacgatgatctgtttgaggagctggaagagcagcttttgatcgccgatgtgggtgtggaaaccacacgtaaaattatcaccaatctgacggaaggcgcatcccgcaagcagcttcgtgacgccgaggcgctctatggcctgctgaaagaagagatgggcgagattctggcgaaagtcgatgagccgctgaatgttgaaggcaaagcgccgtttgtgatcctgatggtgggcgtcaacggtgtgggtaaaaccacgacgattggtaagctggcgcgtcagtttgagcagcagggtaaatcggtgatgctggcggcgggtgatactttccgtgcagctgcggttgaacagcttcaggtctggggtcagcgcaacaatattccggtgattgcccagcataccggggcggattccgcctctgttatcttcgacgccattcaggcagctaaagcgcgtaatatcgacgtcctgattgccgatacagccggacgcctgcagaacaaatcgcacctgatggaagagttgaagaaaatcgtccgcgtgatgaagaaactcgacgttgaagcgccgcatgaagttatgctgactattgatgccagcaccgggcagaacgcggtaagccaggccaaactgttccatgaagccgttggcttaaccggcatcacgctaacgaaactggacggcacggcgaaaggcggggtaattttctcggtggctgaccagtttggtatccctatccgctacattggtgtcggcgaacgtattgaggatttgcgtccgtttaaggcggacgactttatagaggcactttttgcccgagaggattaa

SEQ ID NO: 49 - DNA, 1646 bp, Escherichia coli
atcaagatggcaagagaatgaatcccgatgagcttactgtagtaagtgattcaggtgaaagaatgcagccaacacagagacagattgaaggatgaagagtttgacggctagctcagtcctaggtacagtgctagctaagtaggtacgtaaggaggtgataaatgggttccacctcgtcgctgtatgcagccattgatctcggttcgaatagttttcatatgctggttgtgcgcgaggtggctggaagcatccagacgctgacgcgaataaaacgcaaagtgcgtctggctgctggcctgaatagcgaaaatgccctctccaatgaagcaatggagcgcggttggcaatgtttgcgcctgtttgctgaacgtctgcaagatattcctccctcgcaaattcgcgttgtcgctacggcgacgttacgccttgccgtcaatgcgggtgattttattgccaaagcgcaggaaattctcggttgtccggtacaggtgatcagcggtgaagaggaagcacgtctgatttatcagggcgttgctcacaccactggtggtgccgatcagcgcctggtggtggatataggcggagccagtactgaactggtaaccggcacgggtgcacaaaccacctcgttgttcagcctgtcgatgggctgcgtcacctggctggaacgctattttgccgatcgtaatctggggcaggaaaattttgatgctgcagaaaaagcggcacgcgaagtgttacgtccggttgccgatgaattacggtatcacggctggaaagtgtgcgttggtgcttccggcaccgtgcaggcgttacaggaaatcatgatggcacaggggatggatgaacgcattaccctggaaaagttgcagcaattgaaacagcgagccattcattgcggtcggctggaggaactggagattgacgggctgacgctggaacgtgcgttagtgttcccgagtggtctggcgatcctgatcgccatttttaccgaactgaatattcagtgtatgaccctggcgggcggtgcgctgcgtgaaggcctggtctacggcatgttgcatctggccgtcgagcaggatattcgcagccgtacgctgcgtaatattcaacgccgctttatgatcgatattgatcaggcacagcgcgtagccaaagttgcggctaacttcttcgatcaggtggaaaacgaatggcatcttgaagcaataagccgcgatttgctcatcagcgcctgtcagcttcatgaaatcggcctgagcgttgacttcaaacaagcgccgcaacacgctgcttatctggtgcgtaatctggatcttcccggttttacccccgcacagaaaaaattgctggcgacgctactgctcaaccagactaatccggtcgatctctcatcgctgcatcagcaaaatgccgtaccgccgcgcgtcgcagaacaactctgccgtttactacgcctggccatcatttttgccagccgtcgccgtgacgatctcgtgccagagatgacattacaggctaaccatgaactgttgaccttgacgcttccgcaaggttggctaacccaacatccgctgggtaaagagattattgctcaggaaagccagtggcagagctatgtccactggccgctggaagtgcattaa

SEQ ID NO: 50 - protein, 449 aa, Escherichia coli
MSEIVVSKFGGTSVADFDAMNRSADIVLSDANVRLVVLSASAGITNLLVALAEGLEPGERFEKLDAIRNIQFAILERLRYPNVIREEIERLLENITVLAEAAALATSPALTDELVSHGELMSTLLFVEILRERDVQAQWFDVRKVMRTNDRFGRAEPDIAALAELAALQLLPRLNEGLVITQGFIGSENKGRTTTLGRGGSDYTAALLAEALHASRVDIWTDVPGIYTTDPRVVSAAKRIDEIAFAEAAEMATFGAKVLHPATLLPAVRSDIPVFVGSSKDPRAGGTLVCNKTENPPLFRALALRRNQTLLTLHSLNMLHSRGFLAEVFGILARHNISNDLITTSEVSVALTLDTTGSTSTGDTLLTQSLLMELSALCRVEVEEGLALVALIGNDLSKACGVGKEVFGVLEPFNIRMICYGASSHNLCFLVPGEDAEQVVQKLHSNLFE

SEQ ID NO: 51 - protein, 127 aa, Escherichia coli
MSRRNTDAITIHSILDWIEDNLESPLSLEKVSERSGYSKWHLQRMFKKETGHSLGQYIRSRKMTEIAQKLKESNEPILYLAERYGFESQQTLTRTFKNYFDVPPHDYRMTNMQGESRFLHPLNHYNS

SEQ ID NO: 52 - protein, 127 aa, Escherichia coli
MSRRNTDAITIHSILDWIEDNLESPLSLEKVSERSGYSKWHLQRMFKKETGHSLGQYIRSRKMTEIAQKLKESNEPILYLAERYGFESQQTLTRTFKNYFDVPPHKMRMTNMQGESRFLHPLNHYNS

SEQ ID NO: 53 - protein, 127 aa, Escherichia coli
MSRRNTDAITIHSILDWIEDNLESPLSLEKVSERSGYSKWHLQRMFKKETGHSLGQYIRSRKMTEIAQKLKESNEPILYLAERYGFESQQTLTRTFKNYFDVPPHKYRQTNMQGESRFLHPLNHYNS

SEQ ID NO: 54 - protein, 810 aa, Escherichia coli
MSVIAQAGAKGRQLHKFGGSSLADVKCYLRVAGIMAEYSQPDDMMVVSANGSTTNQLINWLKLSQTDRLSAHQVQQTLRRYQCDLISGLLPAEEADSLISAFVSDLERLAALLDSGINDAVYAEVVGHGEVWSARLMSAVLNQQGLPAAWLDAREFLRAERAAQPQVDEGLSYPLLQQLLVQHPGKRLVVTGFISRNNAGETVLLGRNGSDYSATQIGALAGVSRVTIWSDVAGVYSADPRKVKDACLLPLLRLDEASELARLAAPVLHARTLQPVSGSEIDLQLRCSYTPDQGSTRIERVLASGTGARIVTSHDDVCLIEFQVPASQDFKLAHKEIDQILKRAQVRPLAVGVHNDRQLLQFCYTSEVADSALKILDEAGLPGELRLRQGLALVAMVGAGVTRNPLHCHRFWQQLKGQPVEFTWQSDDGISLVAVLRTGPTESLIQGLHQSVFRAEKRIGLVLFGKGNIGSRWLELFAREQSTLSARTGFEFVLAGVVDSRRSLLSYDGLDASRALAFFNDEAVEQDEESLFLWMRAHPYDDLVVLDVTASQQLADQYLDFASHGFHVISANKLAGASDSNKYRQIHDAFEKTGRHWLYNATVGAGLPINHTVRDLIDSGDTILSISGIFSGTLSWLFLQFDGSVPFTELVDQAWQQGLTEPDPRDDLSGKDVMRKLVILAREAGYNIEPDQVRVESLVPAHCEGGSIDHFFENGDELNEQMVQRLEAAREMGLVLRYVARFDANGKARVGVEAVREDHPLASLLPCDNVFAIESRWYRDNPLVIRGPGAGRDVTAGAIQSDINRLAQLL

SEQ ID NO: 55 - protein, 810 aa, Escherichia coli
MSVIAQAGAKGRQLHKFGGSSLADVKCYLRVAGIMAEYSQPDDMMVVSAAGSTTNQLINWLKLSQTDRLSAHQVQQTLRRYQCDLISGLLPAEEADSLISAFVSDLERLAALLDSGINDAVYAEVVGHGEVWSARLMSAVLNQQGLPAAWLDAREFLRAERAAQPQVDEGLSYPLLQQLLVQHPGKRLVVTGFISRNNAGETVLLGCNGSDYSATQIGALAGVSRVTIWSDVAGVYSADPRKVKDACLLPLLRLDEASELARLAAPVLHARTLQPVSGSEIDLQLRCSYTPDQGSTRIERVLASGTGARIVTSHDDVCLIEFQVPASQDFKLAHKEIDQILKRAQVRPLAVGVHNDRQLLQFCYTSEVADSALKILDEAGLPGELRLRQGLALVAMVGAGVTRNPLHCHRFWQQLKGQPVEFTWQSDDGISLVAVLRTGPTESLIQGLHQSVFRAEKRIGLVLFGKGNIGSRWLELFAREQSTLSARTGFEFVLAGVVDSRRSLLSYDGLDASRALAFFNDEAVEQDEESLFLWMRAHPYDDLVVLDVTASQQLADQYLDFASHGFHVISANKLAGASDSNKYRQIHDAFEKTGRHWLYNATVGAGLPINHTVRDLIDSGDTILSISGIFSGTLSWLFLQFDGSVPFTELVDQAWQQGLTEPDPRDDLSGKDVMRKLVILAREAGYNIEPDQVRVESLVPAHCEGGSIDHFFENGDELNEQMVQRLEAAREMGLVLRYVARFDANGKARVGVEAVREDHPLASLLPCDNVFAIESRWYRDNPLVIRGPGAGRDVTAGAIQSDINRLAQLL

SEQ ID NO: 56 - protein, 810 aa, Escherichia coli
MSVIAQAGAKGRQLHKFGGSSLADVKCYLRVAGIMAEYSQPDDMMVVSAAGSTTNQLINWLKLSQTDRLSAHQVQQTLRRYQCDLISGLLPAEEADSLISAFVSDLERLAALLDSGINDAVYAEVVGHGEVWSARLMSAVLNQQGLPAAWLDAREFLRAERAAQPQVDEGLSYPLLQQLLVQHPGKRLVVTGFISRNNAGETVLLGRNGSDYSATQIGALAGVSRVTIWVDVAGVYSADPRKVKDACLLPLLRLDEASELARLAAPVLHARTLQPVSGSEIDLQLRCSYTPDQGSTRIERVLASGTGARIVTSHDDVCLIEFQVPASQDFKLAHKEIDQILKRAQVRPLAVGVHNDRQLLQFCYTSEVADSALKILDEAGLPGELRLRQGLALVAMVGAGVTRNPLHCHRFWQQLKGQPVEFTWQSDDGISLVAVLRTGPTESLIQGLHQSVFRAEKRIGLVLFGKGNIGSRWLELFAREQSTLSARTGFEFVLAGVVDSRRSLLSYDGLDASRALAFFNDEAVEQDEESLFLWMRAHPYDDLVVLDVTASQQLADQYLDFASHGFHVISANKLAGASDSNKYRQIHDAFEKTGRHWLYNATVGAGLPINHTVRDLIDSGDTILSISGIFSGTLSWLFLQFDGSVPFTELVDQAWQQGLTEPDPRDDLSGKDVMRKLVILAREAGYNIEPDQVRVESLVPAHCEGGSIDHFFENGDELNEQMVQRLEAAREMGLVLRYVARFDANGKARVGVEAVREDHPLASLLPCDNVFAIESRWYRDNPLVIRGPGAGRDVTAGAIQSDINRLAQLL

SEQ ID NO: 57 - protein, 810 aa, Escherichia coli
MSVIAQAGAKGRQLHKFGGSSLADVKCYLRVAGIMAEYSQPDDMMVVSAAGSTTNQLINWLKLSQTDRLSAHQVQQTLRRYQCDLISGLLPAEEADSLISAFVSDLERLAALLDSGINDAVYAEVVGHGEVWSARLMSAVLNQQGLPAAWLDAREFLRAERAAQPQVDEGLSYPLLQQLLVQHPGKRLVVTGFISRNNAGETVLLGRNGSDYSATQIGALAGVSRVTIISDVAGVYSADPRKVKDACLLPLLRLDEASELARLAAPVLHARTLQPVSGSEIDLQLRCSYTPDQGSTRIERVLASGTGARIVTSHDDVCLIEFQVPASQDFKLAHKEIDQILKRAQVRPLAVGVHNDRQLLQFCYTSEVADSALKILDEAGLPGELRLRQGLALVAMVGAGVTRNPLHCHRFWQQLKGQPVEFTWQSDDGISLVAVLRTGPTESLIQGLHQSVFRAEKRIGLVLFGKGNIGSRWLELFAREQSTLSARTGFEFVLAGVVDSRRSLLSYDGLDASRALAFFNDEAVEQDEESLFLWMRAHPYDDLVVLDVTASQQLADQYLDFASHGFHVISANKLAGASDSNKYRQIHDAFEKTGRHWLYNATVGAGLPINHTVRDLIDSGDTILSISGIFSGTLSWLFLQFDGSVPFTELVDQAWQQGLTEPDPRDDLSGKDVMRKLVILAREAGYNIEPDQVRVESLVPAHCEGGSIDHFFENGDELNEQMVQRLEAAREMGLVLRYVARFDANGKARVGVEAVREDHPLASLLPCDNVFAIESRWYRDNPLVIRGPGAGRDVTAGAIQSDINRLAQLL

SEQ ID NO: 58 - DNA, 620 bp, Escherichia coli
cctgagatttttgtgcctgtgcgcaggctttttcggtctttatcttgcagcgataagtgcttacagtaatctgtaggaaagttaactacggatgtacattttgacggctagctcagtcctaggtacagtgctagctaagtaggtacgtaaggaggtgataaatggaactgacgactcgcactttacctgcgcggaaacatattgcgctggtggcacacgatcactgcaaacaaatgctgatgagctgggtggaacggcatcaaccgttactggaacaacacgtactgtatgcaacaggcactaccggtaacttaatttcccgcgcgaccggcatgaacgtcaacgcgatgttgagtggcccaatggggggtgaccagcaggttggcgcattgatctcagaagggaaaattgatgtattgattttcttctgggatccactaaatgccgtgccgcacgatcctgacgtgaaagccttgctgcgtctggcgacggtatggaacattccggtcgccaccaacgtggcaacggcagacttcataatccagtcgccgcatttcaacgacgcggtcgatattctgatccccgattatcagcgttatctcgcggaccgtctgaagtaa

SEQ ID NO: 59 - protein, 14 aa, Escherichia coli
MSQLTHINAAGEAH

SEQ ID NO: 60 - protein, 14 aa, Escherichia coli
MSVIETATVPLAQQ

SEQ ID NO: 61 - protein, 289 aa, Escherichia coli
MDQAGIIRDLLIWLEGHLDQPLSLDNVAAKAGYSKWHLQRMFKDVTGHAIGAYIRARRLSKSAVALRLTARPILDIALQYRFDSQQTFTRAFPKQFAQTPALYRRSPEWSAFGIRPPLRLGEFTMPEHKFVTLEDTPLIGVTQSYSCSLEQISDFRHEMRYQFWHDFLGNAPTIPPVLYGLNETRPSQDKDDEQEVFYTTALAQDQADGYVLTGHPVMLQGGEYVMFTYEGLGTGVQEFILTVYGTCMPMLNLTRRKGQDIERYYPAEDAKAGDRPINLRCELLIPIRR

SEQ ID NO: 62 - DNA, 458 bp, Escherichia coli
gtctggtgcctgcgggctgatgttgcagcagagcttaggtcacttagacgctacttgacggctagctcagtcctaggtacagtgctagctaagtaggtacgtaaggaggtgataatatcatttatccaatggcatggaatcgaaatcagtcgatacccgcagtatatatcgtgaactgggtgcaacgctgagttacaacatgcgcctggggaacggtatggaaatgaaccctggctgaaggcggctgtgcgcaaagaatttgtcgagataaccgggtgaaggtgaataatgacggtaatttcgtcaatgatttgtcgggcagacgtggaatataccaggcagctattaaagcctcattcagcagtacgtttagcggacatctcggggtggggtatagccatggtgccggtgtggaatccccgtggaacgcggtggctggtgtgaactggtcgttctga

SEQ ID NO: 63 - DNA, 713 bp, Escherichia coli
aaaatgcaaaagacgcaccacgctgggaaaatcgctgctattcagcagagttttgtatcgagaatggtggccagccacttattgctctcgcgtaagcgggttgacggctagctcagtcctaggtacagtgctagctaagtaggtacgtaaggaggtgataataccgtgacattctgcctgaacttgacctggtactgtggctgattaaagccgatgaccgtgccctgtctgtggatgagtatttctggcgacacatcctgcagtgcggacatcagcaggtgctgtttgtggtgacgcaggccgacaaaacggagccctgccatgaatgggatatggccggtattcagccttctcctgcacaggcacagaatattcgcgaaaaaacggaggcggtattccgtctgttccggcccgtacatccggttgtggccgtatcggcccgcaccggctgggaactggatacgctggtcagtgcgctcatgacagcgcttcccgaccatgccgccagtcccctgatgacccgactgcaggacgagctgcgcacggaatctgtccggtctcaggcccgtgaacagtttaccggtgcggtggaccggatatttgacacggcggagagcgtctgtattgcctctgttgcacgcacggttctgcgtgccgtccgtgacacggtggtctctgttgcccgtgcggtatggaactggattttcttctga

SEQ ID NO: 64 - DNA, 1427 bp, Escherichia coli
aagttttaactcatacgcagttaataaaaccattccatatgaatggtcggtatcttattgcctttaaaacagtgattttaaaaatcgcttaggggatgttttgacggctagctcagtcctaggtacagtgctagctaagtaggtacgtaaggaggtgataaatgctcacgaaaaagaaatgggcgttatttagtctattaacactgtgtggcggtacaatttataaattaccgtcgctgaaagatgcgttttatatcccgatgcaggaatatttccatttgaccaatggtcaaattggtaatgctatgtcggtaaactcatttgtcaccacagtgggcttttttctgtctatttattttgccgataaactaccgcgcagatacaccatgtcattctcactcattgcgacaggattactgggtgtttatttgacgacaatgccggggtattggggcatcctctttgtctgggcgctatttggcgttacttgcgacatgatgaactggccggtcttgctcaagtcggtaagtcgattgggcaatagcgaacaacaaggtcggttgtttggcttcttcgaaacagggcgtggcattgtcgataccgtggtggcattttctgcgttggcagtatttacctggtttggcagtggcttattaggttttaaagcaggcatctggttctattcccttattgtgattgccgtaggcattattattttctttgtcctgaatgacaaagaagaggcaccgtccgttgaggtgaaaaaagaagacggagcatcgaaaaacaccagtatgacctcggtgctgaaagacaaaactatctggcttatcgcttttaacgtcttcttcgtttacgcggtttactgtggcctgacattcttcattccattcctgaaaaacatctatctattgcccgttgcgctggtgggggcttacggcatcattaaccaatactgtctgaaaatgattggtggaccgattggtggcatgatttcagataagatcctgaaatcgccaagtaaatatctatgctacacctttatcattagtaccgctgcgctcgtactgttgattatgctgccgcacgaaagtatgccggtctatttagggatggcatgtacgctgggctttggcgcgatagtctttacacagcgagccgtattttttgcacctatcggcgaagcaaaaattgctgaaaataaaacaggtgcggcgatggcgttgggtagctttattggttacgctccggcgatgttctgcttcagtctgtatggctacattctggatttaaatccggggattattggctacaaaatcgtgtttggcattatggcctgcttcgcattcagtggtgcggtggtttccgtaatgctggttaagcgtattagccaacgtaagaaagagatgctggcggctgaagcttaa

SEQ ID NO: 65 - protein, 4 aa, Escherichia coli
MRIA

SEQ ID NO: 66 - protein, 14 aa, Escherichia coli
MSFFHASQRDALNQ

SEQ ID NO: 67 - protein, 14 aa, Escherichia coli
MSDRIDRDVINALI

SEQ ID NO: 68 - protein, 4 aa, Escherichia coli
MKEV

SEQ ID NO: 69 - protein, 883 aa, Escherichia coli
MNEQYSALRSNVSMLGKVLGETIKDALGEHILERVETIRKLSKSSRAGNDANRQELLTTLQNLSNDELLPVARAFSQFLNLANTAEQYHSISPKGEAASNPEVIARTLRKLKNQPELSEDTIKKAVESLSLELVLTAHPTEITRRTLIHKMVEVNACLKQLDNKDIADYEHNQLMRRLRQLIAQSWHTDEIRKLRPSPVDEAKWGFAVVENSLWQGVPNYLRELNEQLEENLGYKLPVEFVPVRFTSWMGGDRDGNPNVTADITRHVLLLSRWKATDLFLKDIQVLVSELSMVEATPELLALVGEEGAAEPYRYLMKNLRSRLMATQAWLEARLKGEELPKPEGLLTQNEELWEPLYACYQSLQACGMGIIANGDLLDTLRRVKCFGVPLVRIDIRQESTRHTEALGELTRYLGIGDYESWSEADKQAFLIRELNSKRPLLPRNWQPSAETREVLDTCQVIAEAPQGSIAAYVISMAKTPSDVLAVHLLLKEAGIGFAMPVAPLFETLDDLNNANDVMTQLLNIDWYRGLIQGKQMVMIGYSDSAKDAGVMAASWAQYQAQDALIKTCEKAGIELTLFHGRGGSIGRGGAPAHAALLSQPPGSLKGGLRVTEQGEMIRFKYGLPEITVSSLSLYTGAILEANLLPPPEPKESWRRIMDELSVISCDVYRGYVRENKDFVPYFRSATPEQELGKLPLGSRPAKRRPTGGVESLRAIPWIFAWTQNRLMLPAWLGAGTALQKVVEDGKQSELEAMCRDWPFFSTRLGMLEMVFAKADLWLAEYYDQRLVDKALWPLGKELRNLQEEDIKVVLAIANDSHLMADLPWIAESIQLRNIYTDPLNVLQAELLHRSRQAEKEGQEPDPRVEQALMVTIAGIAAGMWNTG

SEQ ID NO: 70 - protein, 753 aa, Escherichia coli
MTILNHTLGFPRVGLRRELKKAQESYWAGNSTREELLAVGRELRARHWDQQKQAGIDLLPVGDFAWYDHVLTTSLLLGNVPARHQNKDGSVDIDTLFRIGRGRAPTGEPAAAAEMTKWFNTNYHYMVPEFVKGQQFKLTWTQLLDEVDEALALGHKVKPVLLGPVTWLWLGKVKGEQFDRLSLLNDILPVYQQVLAELAKRGIEWVQIDEPALVLELPQAWLDAYKPAYDALQGQVKLLLTTYFEGVTPNLDTITALPVQGLHVDLVHGKDDVAELHKRLPSDWLLSAGLINGRNVWRADLTEKYAQIKDIVGKRDLWVASSCSLLHSPIDLSVETRLDAEVKSWFAFALQKCHELALLRDALNSGDTAALAEWSAPIQARRHSTRVHNPAVEKRLAAITAQDSQRANVYEVRAEAQRARFKLPAWPTTTIGSFPQTTEIRTLRLDFKKGNLDANNYRTGIAEHIKQAIVEQERLGLDVLVHGEAERNDMVEYFGEHLDGFVFTQNGWVQSYGSRCVKPPIVIGDISRPAPITVEWAKYAQSLTDKPVKGMLTGPVTILCWSFPREDVSRETIAKQIALALRDEVADLEAAGIGIIQIDEPALREGLPLRRSDWDAYLQWGVEAFRINAAVAKDDTQIHTNMCYCEFNDIMDSIAALDADVITIETSRSDMELLESFEEFDYPNEIGPGVYDIHSPNVPSVEWIEALLKKAAKRIPAERLWVNPDCGLKTRGWPETRAALANMVQAAQNLRRG

SEQ ID NO: 71 - protein, 753 aa, Escherichia coli
MTILNHTLGFPRVGLRRELKKAQESYWAGNSTREELLAVGRELRARHWDQQKQAGIDLLPVGDFAWYDHVLTTSLLLGNVPARHQNKDGSVDIDTLFRIGRGRAPTGEPAAAAEMTKWFNTNYHYMVPEFVKGQQFKLTWTQLLDEVDEALALGHKVKPVLLGPVTWLWLGKVKGEQFDRLSLLNDILPVYQQVLAELAKRGIEWVQIDEPALVLELPQAWLDAYKPAYDALQGQVKLLLTTYFEGVTPNLDTITALPVQGLHVDLVHGKDDVAELHKRLPSDWLLSAGLINGRNVWRADLTEKYAQIKDIVGKRDLWVASSCSLLHSPIDLSVETRLDAEVKSWFAFALQKCHELALLRDALNSGDTAALAEWSAPIQARRHSTRVHNPAVEKRLAAITAQDSQRANVYEVRAEAQRARFKLPAWPTTTIGSFPQTTEIRTLRLDFKKGNLDANNYRTGIAEHIKQAIVEQERLGLDVLVHGEAERNDMVEYFGEHLDGFVFTQNGWVQSYGSRCVKPPIVIGDISRPAPITVEWAKYAQSLTDKPVKGMLTGPVTILCWSFPREDVSRETIAKQIALALRDEVADLEAAGIGIIQIDEPALREGLPLRRSDWDAYLQWGVEAFRINAAVAKDDTQIHTHMCYCEFNDIMDSIAALDADVITIETSRSDMELLESFEEFDYPNEIGPGVYDIHSPNVPSVEWIEALLKKAAKRIPAERLWVNPDHGLKTRGWPETRAALANMVQAAQNLRRG

SEQ ID NO: 72 - protein, 355 aa, Escherichia coli
MRKILITGGAGFIGSALVRYIINETSDAVVVVDKLTYAGNLMSLAPVAQSERFAFEKVDICDRAELARVFTEHQPDCVMHLAAESHVDRSIDGPAAFIETNIVGTYTLLEAARAYWNALTEDKKSAFRFHHISTDEVYGDLHSTDDFFTETTPYAPSSPYSASKASSDHLVRAWLRTYGLPTLITNCSNNYGPYHFPEKLIPLMILNALAGKSLPDYGNGQQIRDWLYVEDHARALYCVATTGKVGETYNIGGHNERKNLDVVETICELLEELAPNKPHGVAHYRDLITFVADRPGHDLRYAIDASKIARELGWLPQETFESGMRKTVQWYLANESWWKQVQDGSYQGERLGLKG

SEQ ID NO: 73 - protein, 261 aa, Escherichia coli
MSYQYVNVVTINKVAVIEFNYGRKLNALSKVFIDDLMQALSDLNRPEIRCIILRAPSGSKVFSANHDIHELPSGGRDPLSYDDPLRQITRMIQKFPKPIISMVEGSVWGGAFEMIMSSDLIIAASTSTFSMTPVNLGVPYNLVGIHNLTRDAGFHIVKELIFTASPITAQRALAVGILNHVVEVEELEDFTLQMAHHISEKAPLAIAVIKEELRVLGEAHTMNSDEFERIQGMRRAVYDSEDYQEGMNAFLEKRKPNFVGH

SEQ ID NO: 74 - protein, 420 aa, Escherichia coli
MPHSLFSTDTDLTAENLLRLPAEFGCPVWVYDAQIIRRQIAALKQFDVVRFAQKACSNIHILRLMREQGVKVDSVSLGEIERALAAGYNPQTHPDDIVFTADVIDQATLERVSELQIPVNAGSVDMLDQLGQVSPGHRVWLRVNPGFGHGHSQKTNTGGENSKHGIWYTDLPAALDVIQRHHLQLVGIHMHIGSGVDYAHLEQVCGAMVRQVIEFGQDLQAISAGGGLSVPYQQGEEAVDTEHYYGLWNAAREQIARHLGHPVKLEIEPGRFLVAQSGVLITQVRSVKQMGSRHFVLVDAGFNDLMRPAMYGSYHHISALAADGRSLEHAPTVETVVAGPLCESGDVFTQQEGGNVETRALPEVKAGDYLVLYDTGAYGASMSSNYNSRPLLPEVLFDNGQARLIRRRQTIEELLALELL

SEQ ID NO: 75 - protein, 420 aa, Escherichia coli
MPHSLFSTDTDLTAENLLRLPAEFGCPVWVYDAQIIRRQIAALKQFDVVRFAQKACSIIHILRLMREQGVKVDSVSLGEIERALAAGYNPQTHPDDIVFTADVIDQATLERVSELQIPVNAGSVDMLDQLGQVSPGHRVWLRVNPGFGHGHSQKTNTGGENSKHGIWYTDLPAALDVIQRHHLQLVGIHMHIGSGVDYAHLEQVCGAMVRQVIEFGQDLQAISAGGGLSVPYQQGEEAVDTEHYYGLWNAAREQIARHLGHPVKLEIEPGRFLVAQSGVLITQVRSVKQMGSRHFVLVDAGFNDLMRPAMYGSYHHISALAADGRSLEHAPTVETVVAGPLCESGDVFTQQEGGNVETRALPEVKAGDYLVLHDTGAYGASMSSNYNSRPLLPEVLFDNGQARLIRRRQTIEELLALELL

SEQ ID NO: 76 - protein, 449 aa, Escherichia coli
MSEIVVSKFGGTSVADFDAMNRSADIVLSDANVRLVVLSASAGITNLLVALAEGLEPGERFEKLDAIRNIQFAILERLRYPNVIREEIERLLENITVLAEAAALATSPALTDELVSHGELMSTLLFVEILRERDVQAQWFDVRKVMRTNDRFGRAEPDIAALAELAALQLLPRLNEGLVITQGFIGSENKGRTTTLGRGGSDYTAALLAEALHASRVDIWTDVPGIYTTDPRVVSAAKRIDEIAFAEAAEMATFGAKVLHPATLLPAVRSDIPVFVGSSKDPRAGGTLVCNKTENPPLFRALALRRNQTLLTLHSLNMLHSRGFLAEVFGILARHNISVDLITTSEVSVALTLDTTGSTSTGDTLLTQSLLMELSARCRVEVEEGLALVALIGNDLSKACGVGKEVFGVLEPFNIRMICYGASSHNLCFLVPGEDAEQVVQKLHSNLFE

SEQ ID NO: 77 - protein, 667 aa, Escherichia coli
MSRKDLANAIRALSMDAVQKANSGHPGAPMGMADIAEVLWNDFLKHNPTDPTWYDRDRFILSNGHASMLLYSLLHLTGYDLPLEELKNFRQLHSKTPGHPEIGYTPGVETTTGPLGQGLANAVGLAIAERTLAAQFNQPDHEIVDHFTYVFMGDGCLMEGISHEVCSLAGTLGLGKLIGFYDHNGISIDGSTEGWFTDDTAKRFEAYHWHVIHEIDGHDPQAVKEAILEAQSVKDKPSLIICRTVIGFGSPNKAGKEEAHGAPLGEEEVALARQKLGWHHPPFEIPKEIYHAWDAREKGEKAQQSWNEKFAAYKKAHPQLAEEFTRRMSGGLPKDWEKTTQKYINELQANPAKIATRKASQNTLNAYGPMLPELLGGSADLAPSNLTIWKGSVSLKEDPAGNYIHYGVREFGMTAIANGIAHHGGFVPYTATFLMFVEYARNAARMAALMKARQIMVYTHDSIGLGEDGPTHQAVEQLASLRLTPNFSTWRPCDQVEAAVGWKLAVERHNGPTALILSRQNLAQVERTPDQVKEIARGGYVLKDSGGKPDIILIATGSEMEITLQAAEKLAGEGRNVRVVSLPSTDIFDAQDEEYRESVLPSNVAARVAVEAGIADYWYKYVGLKGAIVGMTGYGESAPADKLFPFFGFTAENIVAKAHKVLGVKGA

SEQ ID NO: 78 - protein, 667 aa, Escherichia coli
MSRKDLANAIRALSMDAVQKANSGHPGAPMGMADIAEVLWNDFLKHNPTDPTWYDRDRFILSNGHASMLLYSLLHLTGYDLPLEELKNFRQLHSKTPGHPEIGYTPGVETTTGPLGQGLANAVGLAIAERTLAAQFNQPDHEIVDHFTYVFMGDGCLMEGISHEVCSLAGTLGLGKLIGFYDHNGISIDGETEGWFTDDTAKRFEAYHWHVIHEIDGHDPQAVKEAILEAQSVKDKPSLIICRTVIGFGSPNKAGKEEAHGAPLGEEEVALARQKLGWHHPPFEIPKEIYHAWDAREKGEKAQQSWNEKFAAYKKAHPQLAEEFTRRMSGGLPKDWEKTTQSYINELQANPAKIATRKASQNTLNAYGPMLPELLGGSADLAPSNLTIWKGSVSLKEDPAGNYIHYGVREFGMTAIANGIAHHGGFVPYTATFLMFVEYARNAARMAALMKARQIMVYTHDSIGLGEDGPTHQAVEQLASLRLTPNFSTWRPCDQVEAAVGWKLAVERHNGPTALILSRQNLAQVERTPDQVKEIARGGYVLKDSGGKPDIILIATGSEMEITLQAAEKLAGEGRNVRVVSLPSTDIFDAQDEEYRESVLPSNVAARVAVEAGIADYWYKYVGLKGAIVGMTGYGESAPADKLFPFFGFTAENIVAKAHKVLGVKGA

SEQ ID NO: 79 - protein, 667 aa, Escherichia coli
MSRKDLANAIRALSMDAVQKANSGHPGAPMGMADIAEVLWNDFLKHNPTDPTWYDRDRFILSNGHASMLLYSLLHLTGYDLPLEELKNFRQLHSKTPGHPEIGYTPGVETTTGPLGQGLANAVGLAIAERTLAAQFNQPDHEIVDHFTYVFMGDGCLMEGISHEVCSLAGTLGLGKLIGFYDHNGISIDGETEGWFTDDTAKRFEAYHWHVIHEIDGHDPQAVKEAILEAQSVKDKPSLIICRTVIGFGSPNKAGKEEAHGAPLGEEEVALARQKLGWHHPPFEIPKEIYHAWDAREKGEKAQQSWNEKFAAYKKAHPQLAEEFTRRMSGGLPKDWEKTTKKYINELQANPAKIATRKASQNTLNAYGPMLPELLGGSADLAPSNLTIWKGSVSLKEDPAGNYIHYGVREFGMTAIANGIAHHGGFVPYTATFLMFVEYARNAARMAALMKARQIMVYTHDSIGLGEDGPTHQAVEQLASLRLTPNFSTWRPCDQVEAAVGWKLAVERHNGPTALILSRQNLAQVERTPDQVKEIARGGYVLKDSGGKPDIILIATGSEMEITLQAAEKLAGEGRNVRVVSLPSTDIFDAQDEEYRESVLPSNVAARVAVEAGIADYWYKYVGLKGAIVGMTGYGESAPADKLFPFFGFTAENIVAKAHKVLGVKGA

SEQ ID NO: 80 - protein, 449 aa, Escherichia coli
MSEIVVSKFGGTSVADFDAMNRSADIVLSDANVRLVVLSASAGITNLLVALAEGLEPGERFEKLDAIRNIQFAILERLRYPNVIREEIERLLENITVLAEAAALATSPALTDELVSHGELMSTLLFVEILRERDVQAQWFDVRKVMRTNDRFGRAEPDIAALAELAALQLLPRLNEGLVITQGFIGSENKGRTTTLGRGGSDYTAALLAEALHASRVDIWTDVPGIYTTDPRVVSAAKRIDEIAFAEAAEMATFGAKVLHPATLLPAVRSDIPVFVGSSKDPRAGGTLVCNKTENPPLFRALALRRNQTLLTLHSLNMLHSRGFLAEVFGILARHNISVDLIITSEVSVALTLDTTGSTSTGDTLLTQSLLMELSALCRVEVEEGLALVALIGNDLSKACGVGKEVFGVLEPFNIRMICYGASSHNLCFLVPGEDAEQVVQKLHSNLFE

SEQ ID NO: 81 - protein, 667 aa, Escherichia coli
MSRKDLANAIRALSMDAVQKANSGHPGAPMGMADIAEVLWNDFLKHNPTDPTWYDRDRFILSNGHASMLLYSLLHLTGYDLPLEELKNFRQLHSKTPGHPEIGYTPGVETTTGPLGQGLANAVGLAIAERTLAAQFNQPDHEIVDHFTYVFMGDGCLMEGISHEVCSLAGTLGLGKLIGFYDHNGISIDGETEGWFTDDTAKRFEAYHWHVIHEIDGHDPQAVKEAILEAQSVKDKPSLIICRTVIGFGSPNKAGKEEAHGAPLGEEEVALARQKLGWHHPPFEIPKEIYHAWDAREKGEKAQQSWNEKFAAYKKAHPQLAEEFTRRMSGGLPKDWEKTTQKYINELQANPAKIATRKASQNTLNAYGPMLPELLGGSADLAPSNLTIWKGSVSLKEDPAGNYIHYGVREFGMTAIANGIAHHGGFVPYTATFLMFVEYARNAARMAALMKARQIMVYTHDSIGLGEDGPTHQAVEQLASLRLTPNFSTWRPCDQVEAAVGWKLAVERHNGPTALILSRQNLAQVERTPDQVKEIARGGYVLKDSGGKPDIILIATGSEMEITLQAAEKLAGEGRNVRVVSLPSTDIFDAQDEEYRESVLPSNVAARVAVEAGIADYWYKYVGLKGAIVGMTGYGESAPADKLFPFFGFTAENIVAKAHKVLGVKGA

SEQ ID NO: 82 - protein, 450 aa, Escherichia coli
MSEIVVSKFGGTSVADFDAMNRSADIVLSDANVRLVVLSASAGITNLLVALAEGLEPGERFEKLDAIRNIQFAILERLRYPNVIREEIERLLENITVLAEAAALATSPALTDELVSHGELMSTLLFVEILRERDVQAQWFDVRKVMRTNDRFGRAEPDIAALAELAALQLLPRLNEGLVITQGFIGSENKGRTTTLGRGGSDYTAALLAEALHASRVDIWTDVPGIYTTDPRVVSAAKRIDEIAFAEAAEMATFGAKVLHPATLLPAVRSDIPVFVGSSKDPRAGGTLVCNKTENPPLFRALALRRNQTLLTLHSLNMLHSRGFLAEVFGILARHNISVDLITTSEVSVALTLDTTGSTSTGDTLLTQSLLMELSALCRVEVEEGLALVALIGNDLSKACGVGKEVFGVLEPFNIRMICYGASSHNLCFLVPGEDAEQVVQKLHSNLFEK

SEQ ID NO: 83 - protein, 667 aa, Escherichia coli
MSRKDLANAIRALSMDAVQKANSGHPGAPMGMADIAEVLWNDFLKHNPTDPTWYDRDRFILSNGHASMLLYSLLHLTGYDLPLEELKNFRQLHSKTPGHPEWGYTPGVETTTGPLGQGLANAVGLAIAERTLAAQFNQPDHEIVDHFTYVFMGDGCLMEGISHEVCSLAGTLGLGKLIGFYDHNGISIDGETEGWFTDDTAKRFEAYHWHVIHEIDGHDPQAVKEAILEAQSVKDKPSLIICRTVIGFGSPNKAGKEEAHGAPLGEEEVALARQKLGWHHPPFEIPKEIYHAWDAREKGEKAQQSWNEKFAAYKKAHPQLAEEFTRRMSGGLPKDWEKTTQKYINELQANPAKIATRKASQNTLNAYGPMLPELLGGSADLAPSNLTIWKGSVSLKEDPAGNYIHYGVREFGMTAIANGIAHHGGFVPYTATFLMFVEYARNAARMAALMKARQIMVYTHDSIGLGEDGPTHQAVEQLASLRLTPNFSTWRPCDQVEAAVGWKLAVERHNGPTALILSRQNLAQVERTPDQVKEIARGGYVLKDSGGKPDIILIATGSEMEITLQAAEKLAGEGRNVRVVSLPSTDIFDAQDEEYRESVLPSNVAARVAVEAGIADYWYKYVGLKGAIVGMTGYGESAPADKLFPFFGFTAENIVAKAHKVLGVKGA

SEQ ID NO: 84 - protein, 292 aa, Escherichia coli
MFTGSIVAIVTPMDEKGNVCRASLKKLIDYHVASGTSAIVSVGTTGESATLNHDEHADVVMMTLDLADGRIPVIAYTGANATAEAISLTQRFNDSGIVGCLTVTPYYNRPSQEGLYQHFKAIAEHTDLPQILYNVPSRTGCDLLPETVGRLAKVKNIIGIKEATGNLTRVNQIKELVSDDFVLLSGDDASALDFMQLGGHGVISVTANVAARDMAQMCKLAAEGHFAEARVINQRLMPLHNKLFVEPNPIPVKWACKELGLVATDTLRLPMTPITDSGRETVRAALKHAGLL

SEQ ID NO: 85 - protein, 540 aa, Escherichia coli
MRVNNGLTPQELEAYGISDVHDIVYNPSYDLLYQEELDPSLTGYERGVLTNLGAVAVDTGIFTGRSPKDKYIVRDDTTRDTFWWADKGKGKNDNKPLSPETWQHLKGLVTRQLSGKRLFVVDAFCGANPDTRLSVRFITEVAWQAHFVKNMFIRPSDEELAGFKPDFIVMNGAKCTNPQWKEQGLNSENFVAFNLTERMQLIGGTWYGGEMKKGMFSMMNYLLPLKGIASMHCSANVGYKGDVAVFFGLSGTGKTTLSTDPKRRLIGDDEHGWDDDGVFNFEGGCYAKTIKLSKEAEPEIYNAIRRDALLENVTVREDGTIDFDDGSKTENTRVSYPIYHIDNIVKPVSKAGHATKVIFLTADAFGVLPPVSRLTADQTQYHFLSGFTAKLAGTERGITEPTPTFSACFGAAFLSLHPTQYAEVLVKRMQAAGAQAYLVNTGWNGTGKRISIKDTRAIIDAILNGSLDNAETFTLPMFNLAIPTELPGVDTKILDPRNTYASPEQWQEKAETLAKLFIDNFDKYTDTPAGAALVAAGPKL

SEQ ID NO: 86 - protein, 540 aa, Escherichia coli
MRVNNGLTPQELEAYGISDVHDIVYNPSYDLLYQEELDPSLTGYERGVLTNLGAVAVDTGIFTGRSPKDKYIVRDDTTRDTFWWADKGKGKNDNKPLSPETWQHLKGLVTRQLSGKRLFVVDAFCGANPDTRLSVRFITEVAWQAHFVKNMFIRPSDEELAGFKPDFIVMNGAKCTNPQWKEQGLNSENFVAFNLTERMQLIGGTWYQGEMKKGMFSMMNYLLPLKGIASMHCSANVGEKGDVAVFFGLSGTGKTTLSTDPKRRLIGDDEHGWDDDGVFNFEGGCYAKTIKLSKEAEPEIYNAIRRDALLENVTVREDGTIDFDDGSKTENTRVSYPIYHIDNIVKPVSKAGHATKVIFLTADAFGVLPPVSRLTADQTQYHFLSGFTAKLAGTERGITEPTPTFSACFGAAFLSLHPTQYAEVLVKRMQAAGAQAYLVNTGWNGTGKRISIKDTRAIIDAILNGSLDNAETFTLPMFNLAIPTELPGVDTKILDPRNTYASPEQWQEKAETLAKLFIDNFDKYTDTPAGAALVAAGPKL

SEQ ID NO: 87 - protein, 540 aa, Escherichia coli
MRVNNGLTPQELEAYGISDVHDIVYNPSYDLLYQEELDPSLTGYERGVLTNLGAVAVDTGIFTGRSPKDKYIVRDDTTRDTFWWADKGKGKNDNKPLSPETWQHLWGLVTRQLSGKRLFVVDAFCGANPDTRLSVRFITEVAWQAHFVKNMFIRPSDEELAGFKPDFIVMNGAKCTNPQWKEQGLNSENFVAFNLTERMQLIGGTWYGGEMKKGMFSMMNYLLPLKGIASMHCSANVGEKGDVAVFFGLSGTGKTTLSTDPKRRLIGDDEHGWDDDGVFNFEGGCYAKTIKLSKEAEPEIYNAIRRDALLENVTVREDGTIDFDDGSKTENTRVSYPIYHIDNIVKPVSKAGHATKVIFLTADAFGVLPPVSRLTADQTQYHFLSGFTAKLAGTERGITEPTPTFSACFGAAFLSLHPTQYAEVLVKRMQAAGAQAYLVNTGWNGTGKRISIKDTRAIIDAILNGSLDNAETFTLPMFNLAIPTELPGVDTKILDPRNTYASPEQWQEKAETLAKLFIDNFDKYTDTPAGAALVAAGPKL

SEQ ID NO: 88 - protein, 540 aa, Escherichia coli
MRVNNGLTPQELEAYGISDVHDIVYNPSYDLLYQEELDPSLTGYERGVLTNLGAVAVDTGIFTGRSPKDKYIVRDDTTRDTFWWADKGKGKNDNKPLSPETWQHLKGLVTRQLSGKRLFVVDAFCGANPDTRLSVRFITEVAWQAHFVKNMFIRPSDEELAGFKPDFIVMNGAKCTNPQWKEQGLNSENFVAFNLTERMQLIGGTWYGGEMKKGMFSMMNYLLPLKGIASMHCCANVGEKGDVAVFFGLSGTGKTTLSTDPKRRLIGDDEHGWDDDGVFNFEGGCYAKTIKLSKEAEPEIYNAIRRDALLENVTVREDGTIDFDDGSKTENTRVSYPIYHIDNIVKPVSKAGHATKVIFLTADAFGVLPPVSRLTADQTQYHFLSGFTAKLAGTERGITEPTPTFSACFGAAFLSLHPTQYAEVLVKRMQAAGAQAYLVNTGWNGTGKRISIKDTRAIIDAILNGSLDNAETFTLPMFNLAIPTELPGVDTKILDPRNTYASPEQWQEKAETLAKLFIDNFDKYTDTPAGAALVAAGPKL

SEQ ID NO: 89 - protein, 540 aa, Escherichia coli
MRVNNGLTPQELEAYGISDVHDIVYNPSYDLLYQEELDPSLTGYERGVLTNLGAVAVDTGIFTGRSPKDKYIVRDDTTRDTFWWADKGKGKNDNKPLSPETWQHLKGLVTRQLSGKRLFVVDAFCGANPDTRLSVRFITEVAWQAHFVKNMFIRPSDEELAGFKPDFIVMNGAKCENPQWKEQGLNSENFVAFNLTERMQLIGGTWYGGEMKKGMFSMMNYLLPLKGIASMHCSANVGEKGDVAVFFGLSGTGKTTLSTDPKRRLIGDDEHGWDDDGVFNFEGGCYAKTIKLSKEAEPEIYNAIRRDALLENVTVREDGTIDFDDGSKTENTRVSYPIYHIDNIVKPVSKAGHATKVIFLTADAFGVLPPVSRLTADQTQYHFLSGFTAKLAGTERGITEPTPTFSACFGAAFLSLHPTQYAEVLVKRMQAAGAQAYLVNTGWNGTGKRISIKDTRAIIDAILNGSLDNAETFTLPMFNLAIPTELPGVDTKILDPRNTYASPEQWQEKAETLAKLFIDNFDKYTDTPAGAALVAAGPKL

SEQ ID NO: 90 - protein, 540 aa, Escherichia coli
MRVNNGLTPQELEAYGISDVHDIVYNPSYDLLYQEELDPSLTGYERGVLTNLGAVAVDTGIFTGRSPKDKYIVRDDTTRDTFWWADKGKGKNDNKPLSPETWQHLKGLVTRQLSGKRLFVVDAFCGANPDTRLSVRFITEVAWQAHFVKNMFIRPSDEELAGFKPDFIVMNGAKCTCPQWKEQGLNSENFVAFNLTERMQLIGGTWYGGEMKKGMFSMMNYLLPLKGIASMHCSANVGEKGDVAVFFGLSGTGKTTLSTDPKRRLIGDDEHGWDDDGVFNFEGGCYAKTIKLSKEAEPEIYNAIRRDALLENVTVREDGTIDFDDGSKTENTRVSYPIYHIDNIVKPVSKAGHATKVIFLTADAFGVLPPVSRLTADQTQYHFLSGFTAKLAGTERGITEPTPTFSACFGAAFLSLHPTQYAEVLVKRMQAAGAQAYLVNTGWNGTGKRISIKDTRAIIDAILNGSLDNAETFTLPMFNLAIPTELPGVDTKILDPRNTYASPEQWQEKAETLAKLFIDNFDKYTDTPAGAALVAAGPKL

SEQ ID NO: 91 - protein, 540 aa, Escherichia coli
MRVNNGLTPQELEAYGISDVHDIVYNPSYDLLYQEELDPSLTGYERGVLTNLGAVAVDTGIFTGRSPKDKYIVRDDTTRDTFWWADKGKGKNDNKPLSPETWQHLKGLVTRQLSGKRLFVVDAFCGANPDTRLSVRFITEVAWQAHFVKNMFIRPSDEELAGFKPDFIVMNGAKCTNPQWKEQGLNSENFVAFNLTERMQLIGGTWYGGEMKKGMFSMMNYLLPLKGIASMHCSANVGEKGDVAVFFGLSGTGKTTLSTDPKRRLIGDDEHGWDDDGVFNFEGGCYAKTIKLSKEAEPEIYNAIRRDALLENVTVREDGTIDFDDGSKTENTRVSYPIYHIDNIVKPVSKAGHATKVIFLTADAFGVLPPVSRLTADQTQYHFLSGFTAKLAGTERGITEPTPTFSACFGAAFLSLHPTQYAEVLVKRMQAAGAQAYLVNTGWNGTGKRISIKDTRAIIDAILNGSLDNAETFTLPMFNLAIPTELPGVDTKILDPRNYYASPEQWQEKAETLAKLFIDNFDKYTDTPAGAALVAAGPKL

SEQ ID NO: 92 - protein, 540 aa, Escherichia coli
MRVNNGLTPQELEAYGISDVHDIVYNPSYDLLYQEELDPSLTGYERGVLTNLGAQAVDTGIFTGRSPKDKYIVRDDTTRDTFWWADKGKGKNDNKPLSPETWQHLKGLVTRQLSGKRLFVVDAFCGANPDTRLSVRFITEVAWQAHFVKNMFIRPSDEELAGFKPDFIVMNGAKCTNPQWKEQGLNSENFVAFNLTERMQLIGGTWYGGEMKKGMFSMMNYLLPLKGIASMHCSANVGEKGDVAVFFGLSGTGKTTLSTDPKRRLIGDDEHGWDDDGVFNFEGGCYAKTIKLSKEAEPEIYNAIRRDALLENVTVREDGTIDFDDGSKTENTRVSYPIYHIDNIVKPVSKAGHATKVIFLTADAFGVLPPVSRLTADQTQYHFLSGFTAKLAGTERGITEPTPTFSACFGAAFLSLHPTQYAEVLVKRMQAAGAQAYLVNTGWNGTGKRISIKDTRAIIDAILNGSLDNAETFTLPMFNLAIPTELPGVDTKILDPRNTYASPEQWQEKAETLAKLFIDNFDKYTDTPAGAALVAAGPKL

SEQ ID NO: 93 - protein, 292 aa, Escherichia coli
MFTGSIVAIVTPMDEKGNVCRASLKKLIDYHVASGTSAIVSVGTTGESATLNHDEHADVVMMTLDLADGRIPVIAGTGANATAEAISATQRFNDSGIVGCLTVTPYYNRPSQEGLYQHFKAIAEHTDLPQILYNVPSRTGCDLLPETVGRLAKVKNIIGIKEATGNLTRVNQIKELVSDDFVLLSGDDASALDFMQLGGHGVISVTANVAARDMAQMCKLAAEGHFAEARVINQRLMPLHNKLFVEPNPIPVKWACKELGLVATDTLRLPMTPITDSGRETVRAALKHAGLL

SEQ ID NO: 94 - protein, 540 aa, Escherichia coli
MRVNNGLTPQELEAYGISDVHDIVYNPSYDLLYQEELDPSLTGYERGCLTNLGAVAVDTGIFTGRSPKDKYIVRDDTTRDTFWWADKGKGKNDNKPLSPETWQHLKGLVTRQLSGKRLFVVDAFCGANPDTRLSVRFITEVAWQAHFVKNMFIRPSDEELAGFKPDFIVMNGAKCTNPQWKEQGLNSENFVAFNLTERMQLIGGTWYGGEMKKGMFSMMNYLLPLKGIASMHCSANVGEKGDVAVFFGLSGTGKTTLSTDPKRRLIGDDEHGWDDDGVFNFEGGCYAKTIKLSKEAEPEIYNAIRRDALLENVTVREDGTIDFDDGSKTENTRVSYPIYHIDNIVKPVSKAGHATKVIFLTADAFGVLPPVSRLTADQTQYHFLSGFTAKLAGTERGITEPTPTFSACFGAAFLSLHPTQYAEVLVKRMQAAGAQAYLVNTGWNGTGKRISIKDTRAIIDAILNGSLDNAETFTLPMFNLAIPTELPGVDTKILDPRNTYASPEQWQEKAETLAKLFIDNFDKYTDTPAGAALVAAGPKL

SEQ ID NO: 95 - protein, 540 aa, Escherichia coli
MRVNNGLTPQELEAYGISDVHDIVYNPSYDLLYQEELDPSLTGYERGVLTNLGAVAVDTGIFTGRSPKDKYIVRDDTTRDTFWWADKGKGKNDNKPLSPETWQHLKGLVTRQLSGKRLFVVDAFCGANPDTRLSVRFITEVAWQAHFVKNMFIRPSDEELAGFKPDFIVMNGAKCTNPQWKEQGLNSENFVAFNLTERMQLIGGTWYGGEMKKGMFSMMNYLLPLKGIASMHCSANVGEKGDVAVFFGLSGTGKTTLSTDPKRRLIGDDEHGWDDDGVFNFEGGCYAKTIKLSKEAEPEIYNAIRRDALLENVTVREDGTIDFDDGSKTENTRVSYPIYHIDNIVKPVSKAGHATKVIFLTADAFGVLPPHSRLTADQTQYHFLSGFTAKLAGTERGITEPTPTFSACFGAAFLSLHPTQYAEVLVKRMQAAGAQAYLVNTGWNGTGKRISIKDTRAIIDAILNGSLDNAETFTLPMFNLAIPTELPGVDTKILDPRNTYASPEQWQEKAETLAKLFIDNFDKYTDTPAGAALVAAGPKL

SEQ ID NO: 96 - protein, 14 aa, Escherichia coli
MTTETRSLYSQLPA

SEQ ID NO: 97 - protein, 14 aa, Escherichia coli
MSKSNPSEVKLAVP

SEQ ID NO: 98 - protein, 14 aa, Escherichia coli
MITHFRQAIEETLP

SEQ ID NO: 99 - protein, 4 aa, Escherichia coli
MTRK

SEQ ID NO: 100 - protein, 14 aa, Escherichia coli
MTRKQATIAVRSGL

SEQ ID NO: 101 - protein, 2594 aa, Escherichia coli
TCTCCGAGACGCTGCTGCGTATCTCCACCGGTATTGAAGATGGCGAAGATTTAATTGCCGACCTGGAAAATGGCTTCCGGGCTGCAAACAAGGGGTAAAATTGACGGCTAGCTCAGTCCTAGGTACAGTGCTAGCTAAGTAGGTACGTAAGGAGGTGATAAATGAGTGTGATTGCGCAGGCAGGGGCGAAAGGTCGTCAGCTGCATAAATTTGGTGGCAGTAGTCTGGCTGATGTGAAGTGTTATTTGCGTGTCGCGGGCATTATGGCGGAGTACTCTCAGCCTGACGATATGATGGTGGTTTCCGCCGCCGGTAGCACCACTAACCAGTTGATTAACTGGTTGAAACTAAGCCAGACCGATCGTCTCTCTGCGCATCAGGTTCAACAAACGCTGCGTCGCTATCAGTGCGATCTGATTAGCGGTCTGCTACCCGCTGAAGAAGCCGATAGCCTCATTAGCGCTTTTGTCAGCGACCTTGAGCGCCTGGCGGCGCTGCTCGACAGCGGTATTAACGACGCAGTGTATGCGGAAGTGGTGGGCCACGGGGAAGTATGGTCGGCACGTCTGATGTCTGCGGTACTTAATCAACAAGGGCTGCCAGCGGCCTGGCTTGATGCCCGCGAGTTTTTACGCGCTGAACGCGCCGCACAACCGCAGGTTGATGAAGGGCTTTCTTACCCGTTGCTGCAACAGCTGCTGGTGCAACATCCGGGCAAACGTCTGGTGGTGACCGGATTTATCAGCCGCAACAACGCCGGTGAAACGGTGCTGCTGGGGCGTAACGGTTCCGACTATTCCGCGACACAAATCGGTGCGCTGGCGGGTGTTTCTCGCGTAACCATCTGGAGCGACGTCGCCGGGGTATACAGTGCCGACCCGCGTAAAGTGAAAGATGCCTGCCTGCTGCCGTTGCTGCGTCTGGATGAGGCCAGCGAACTGGCGCGCCTGGCGGCTCCCGTTCTTCACGCCCGTACTTTACAGCCGGTTTCTGGCAGCGAAATCGACCTGCAACTGCGCTGTAGCTACACGCCGGATCAAGGTTCCACGCGCATTGAACGCGTGCTGGCCTCCGGTACTGGTGCGCGTATTGTCACCAGCCACGATGATGTCTGTTTGATTGAGTTTCAGGTGCCCGCCAGTCAGGATTTCAAACTGGCGCATAAAGAGATCGACCAAATCCTGAAACGCGCGCAGGTACGCCCGCTGGCGGTTGGCGTACATAACGATCGCCAGTTGCTGCAATTTTGCTACACCTCAGAAGTGGCCGACAGTGCGCTGAAAATCCTCGACGAAGCGGGATTACCTGGCGAACTGCGCCTGCGTCAGGGGCTGGCGCTGGTGGCGATGGTCGGTGCAGGCGTCACCCGTAACCCGCTGCATTGCCACCGCTTCTGGCAGCAACTGAAAGGCCAGCCGGTCGAATTTACCTGGCAGTCCGATGACGGCATCAGCCTGGTGGCAGTACTGCGCACCGGCCCGACCGAAAGCCTGATTCAGGGGCTGCATCAGTCCGTCTTCCGCGCAGAAAAACGCATCGGCCTGGTATTGTTCGGTAAGGGCAATATCGGTTCCCGTTGGCTGGAACTGTTCGCCCGTGAGCAGAGCACGCTTTCGGCACGTACCGGCTTTGAGTTTGTGCTGGCAGGTGTGGTGGACAGCCGCCGCAGCCTGTTGAGCTATGACGGGCTGGACGCCAGCCGCGCGTTAGCCTTCTTCAACGATGAAGCGGTTGAGCAGGATGAAGAGTCGTTGTTCCTGTGGATGCGCGCCCATCCGTATGATGATTTAGTGGTGCTGGACGTTACCGCCAGCCAGCAGCTTGCTGATCAGTATCTTGATTTCGCCAGCCACGGTTTCCACGTTATCAGCGCCAACAAACTGGCGGGAGCCAGCGACAGCAATAAATATCGCCAGATCCACGACGCCTTCGAAAAAACCGGGCGTCACTGGCTGTACAATGCCACCGTCGGTGCGGGCTTGCCGATCAACCACACCGTGCGCGATCTGATCGACAGCGGCGATACTATTTTGTCGATCAGCGGGATCTTCTCCGGCACGCTCTCCTGGCTGTTCCTGCAATTCGACGGTAGCGTGCCGTTTACCGAGCTGGTGGATCAGGCGTGGCAGCAGGGCTTAACCGAACCTGACCCGCGTGACGATCTCTCTGGCAAAGACGTGATGCGCAAGCTGGTGATTCTGGCGCGTGAAGCAGGTTACAACATCGAACCGGATCAGGTACGTGTGGAATCGCTGGTGCCTGCTCATTGCGAAGGCGGCAGCATCGACCATTTCTTTGAAAATGGCGATGAACTGAACGAGCAGATGGTGCAACGGCTGGAAGCGGCCCGCGAAATGGGGCTGGTGCTGCGCTACGTGGCGCGTTTCGATGCCAACGGTAAAGCGCGTGTAGGCGTGGAAGCGGTGCGTGAAGATCATCCGTTGGCATCACTGCTGCCGTGCGATAACGTCTTTGCCATCGAAAGCCGCTGGTATCGCGATAACCCTCTGGTGATCCGCGGACCTGGCGCTGGGCGCGACGTCACCGCCGGGGCGATTCAGTCGGATATCAACCGGCTGGCACAGTTGTTGTAA

SEQ ID NO: 102 - DNA, 2705 bp, Escherichia coli
acccattaaggagtatataaaggtgaatttgatttacatcaataagcggggttgctgaatcgttaaggtaggcggtaatagaaaagaaatcgaggcaaaattgacggctagctcagtcctaggtacagtgctagctaagtaggtacgtaaggaggtgataaatgagcaaagtcagactcgcaattatcggtaacggtatggtcggccatcgctttatcgaagatcttcttgataaatctgatgcggccaactttgatattaccgttttctgtgaagaaccgcgcatcgcttatgaccgcgtacacctctcgtcttacttctctcaccacaccgccgaagagctgtcgctggtgcgcgaaggcttctacgagaaacacggcatcaaagttctggtcggcgaacgcgctatcaccatcaaccgtcaggagaaggtgattcactccagcgccggacgtaccgttttttatgacaagctgatcatggcaaccggttcctacccgtggatcccgccaatcaaaggttctgatactcaggactgctttgtctatcgcactattgaagacctcaacgccattgaatcctgcgcccgtcgcagcaaacgcggtgccgttgttggtggcggcctgttaggtctggaagccgcaggcgcgctgaaaaacttaggtattgaaacccacgttatcgaatttgcccctatgctgatggcagaacagcttgatcagatgggcggcgagcagctgcgtcgcaaaatcgaaagtatgggcgtgcgcgttcacaccagcaaaaacacccttgagattgtgcaggaaggtgttgaagcgcgtaaaaccatgcgttttgccgacggcagcgaactggaagtcgactttatcgtcttctctaccggtatccgtccgcgcgataagctggcaacccagtgtggtctggacgttgctccgcgtgggggtattgtcattaatgattcctgccagacttccgatccggatatctacgccatcggtgaatgcgcaagctggaacaaccgtgtatttggtctggtagcacctggctacaaaatggcgcaggtcgccgttgaccatattctcggtagcgaaaacgcctttgaaggtgctgaccttagcgccaagctgaaactgctgggcgtagacgtaggcggtattggtgatgcgcacggtcgcacgcctggcgcacgtagctacgtttacctcgacgaaagtaaagagatctacaaacgcctgattgtcagcgaagacaacaaaaccctgctcggtgcggtactggtgggcgataccagcgactacggtaacctgctgcaactggtgctgaacgctatcgaactgccggaaaacccggattccctgatcctgccagcacactcgggtagcggcaagccgtctatcggtgttgataaactgccggacagcgcgcaaatctgctcctgcttcgacgtcaccaaaggtgatctgattgctgccatcaacaaaggctgccacacagttgcggcgctgaaagctgaaaccaaagcgggtactggctgcggtggctgtatcccgctggtcactcaggtactgaacgcggaactggcgaaacagggcatcgaagttaacaacaacctgtgcgaacactttgcttattcgcgtcaggaactgttccatttgatccgcgttgaaggcattaaaaccttcgaagaactgctggcgaaacacggcaaaggctacggttgtgaagtttgtaaaccaaccgtcggttcgctgctggcctcctgctggaacgaatacattctgaagccggaacatactccgctgcaggattctaacgacaacttcctcgctaacatccagaaagacggcacctactcggtgatcccgcgttctccgggcggtgaaatcaccccggaagggctgatggcggtaggtcgtatcgcgcgtgaatttaatctctacaccaagatcactggctcccagcgtctggcgatgtttggcgcacagaaagacgatctgccggagatctggcgtcagctgattgaagccggcttcgaaaccggtcatgcctatgcgaaagcactgcgtatggcgaaaacctgcgtgggtagcacctggtgccgctacggcgttggcgacagcgtcggcctcggcgtggaactggaaaaccgctacaaaggcatccgtacgccgcacaaaatgaagttcggtgtctccggctgtacccgtgaatgttcagaagctcagggtaaagacgtgggtattatcgccactgaaaaaggctggaacctgtatgtttgcggtaacggcggcatgaaaccgcgtcatgcggatctgctggcggcggatatcgatcgcgaaacgctgatcaaatatctcgaccgcttcatgatgttctacatccgtactgccgacaaactgacgcgtaccgcaccgtggttagaaaacctcgaaggcggcatcgattacctgaaagcagtgatcattgacgacaaactggggctgaacgcacatctggaagaagagatggcgcgcctgcgtgaagcggtactgtgtgagtggactgaaacggtcaatacgccgtctgcgcagactcgcttcaaacacttcatcaacagcgacaagcgtgacccgaacgtgcagatggtgccagagcgcgaacagcaccgtccggcaacgccgtatgaacgtatcccagtaactctggtggaggacaacgcatga

SEQ ID NO: 103 - DNA, 512 bp, Escherichia coli
gtaaggataatcaaacatcgtgtgcgctgatggcagagtaggtggaggactccagacagtcaaacgatagaaaaagatagcctttatggaggttcctgcattgacggctagctcagtcctaggtacagtgctagctaagtaggtacgtaaggaggtgataaatgtcaaatacataccagaaaagaaaggcaagtaaagagtatggtttatataataaatgtaagaaactaaatgatgatgaattatttcgcttacttgatgatcgcaattccttgaaaaggatttcatctgccagagtattacagttaagaggggggcaagacgctgttagattggcaattgaattctgcactgacaaaaattatatccgtagagatatcggagcatttatactcgggcaaatataaatttgcaaaaaatgcgaagataatgtttttaatattttgaacaatatggcattgaatgataagagtgcttgcgttcgagctacggcaatcgagtcaacggccagg

SEQ ID NO: 104 - DNA, 2204 bp, Escherichia coli
cgtttctcattgaaattcactacacttaaccccatgctacacacattatgtaaagcgcctgttgagcgcttccttaacctctttaaccaggactgcgcgattgacggctagctcagtcctaggtacagtgctagctaagtaggtacgtaaggaggtgataaatgacgaatccgttactgactccctttgaattgcctccgttttctaaaattctcccggaacatgtcgttccagccgtgactaaggcattgaacgactgccgcgaaaacgtggagcgcgtagtagcgcaaggggcaccgtacacctgggaaaatctctgccagccgctggcggaagtggacgatgtgttggggcgtatcttctccccggtcagccacctgaactcggtgaaaaatagcccggaactgcgtgaagcctacgaacaaaccctgccgctgctgtcggaatacagcacctgggtagggcaacatgaagggctgtataaagcgtatcgcgacctgcgcgatggcgatcattacgccacgctgaacacggcgcagaagaaagcggttgataacgcactgcgcgactttgaactctctggcataggtctgccgaaagagaaacagcagcgttacggcgaaattgcgacccgtctttctgaactgggcaaccagtacagcaacaacgtcctcgatgcgacaatgggctggaccaaactcgttaccgacgaagcggagctggcggggatgccagaaagcgcgctggctgcggcaaaagcccaggccgaagcgaaagagctggaaggttatttgctgacgctggatatcccaagctacttgccggtaatgacctactgcgacaaccaggctctgcgtgaagagatgtatcgcgcttacagcacccgcgcctccgatcaaggcccaaacgccggtaaatgggataacagcaaggtgatggaagagatcctcgcgctgcgtcacgaactggcgcaactgctgggctttgaaaactacgcctttaaatcccttgccactaaaatggcagaaaacccgcagcaggtgctggatttcttaaccgatctggcaaaacgcgcgcgtccacaaggcgaaaaagagctggcgcaattgcgtgcctttgccaaagccgaatttggcgtcgatgagttgcagccgtgggatatcgcttactacagcgaaaaacaaaaacagcacctctacagcatcagtgacgaacagctgcgtccgtacttcccggaaaacaaagcggttaacggcctgtttgaagtggttaagcgtatttacggcatcaccgctaaagagcgtaaagatgttgatgtctggcatccggatgtacgtttcttcgaactgtatgacgaaaataacgaactgcgcggtagcttctacctcgatctgtatgcccgtgaaaacaagcgcggcggggcgtggatggatgactgcgtaggccagatgcgtaaagctgatggttctttgcaaaaaccggtcgcgtatttgacttgtaacttcaaccgcccggtaaatggtaaaccggcgctgttcactcacgacgaagtgatcaccctcttccacgagttcggtcacggcctgcaccatatgctgacccgcatcgaaaccgctggtgtttccggtatcagcggtgtgccgtgggatgcggtcgaactgccgagtcagtttatggaaaactggtgctgggagccggaggcgctggcgtttatctctggtcactatgaaaccggcgaaccgctgccgaaagagttgctggataaaatgctggcggcgaagaactaccaggcggcgctgtttattctgcgtcagctggagttcggcctgtttgatttccgccttcatgccgagttccgcccggatcagggggcaaaaatcctcgaaactctggcagaaatcaagaaactggttgccgtggtgccatctccgtcctggggccgtttcccgcacgctttcagccatattttcgccggtggttatgccgcaggttactacagctacctgtgggctgacgtactggcggcagatgctttctcgcgctttgaggaagagggcattttcaaccgtgaaaccgggcagtcgttcctcgacaacattctgagccgtggcggttcagaagagccgatggatctgttcaaacgcttccgtggtcgtgaaccgcagctggatgcgatgctggagcattacggcattaagggctga

SEQ ID NO: 105 - DNA, 1157 bp, Escherichia coli
tacgccttcctgcaagagcgcggcgtggcggcgatttatggtccaggtacacctatgctcgacagtgtgcgcgacgtactgaatctgataagccagcatcttgacggctagctcagtcctaggtacagtgctagctaagtaggtacgtaaggaggtgataaatgattaatgaagccacgctggcagaaagtattcgccgcttacgtcagggtgagcgtgccacactcgcccaggccatgacgctggtggaaagccgtcacccgcgtcatcaggcactaagtacgcagctgcttgatgccattatgccgtactgcggtaacaccctgcgactgggcgttaccggcacccccggcgcggggaaaagtacctttcttgaggcctttggcatgttgttgattcgagagggattaaaggtcgcggttattgcggtcgatcccagcagcccggtcactggcggtagcattctcggggataaaacccgcatgaatgacctggcgcgtgccgaagcggcgtttattcgcccggtaccatcctccggtcatctgggcggtgccagtcagcgagcgcgggaattaatgctgttatgcgaagcagcgggttatgacgtagtgattgtcgaaacggttggcgtcgggcagtcggaaacagaagtcgcccgcatggtggactgttttatctcgttgcaaattgccggtggcggcgatgatctgcagggcattaaaaaagggctgatggaagtggctgatctgatcgttatcaacaaagacgatggcgataaccataccaatgtcgccattgcccggcatatgtacgagagtgccctgcatattctgcgacgtaaatacgacgaatggcagccacgggttctgacttgtagcgcactggaaaaacgtggaatcgatgagatctggcacgccatcatcgacttcaaaaccgcgctaactgccagtggtcgtttacaacaagtgcggcaacaacaatcggtggaatggctgcgtaagcagaccgaagaagaagtactgaatcacctgttcgcgaatgaagatttcgatcgctattaccgccagacgcttttagcggtcaaaaacaatacgctctcaccgcgcaccggcctgcggcagctcagtgaatttatccagacgcaatattttgattaa

SEQ ID NO: 106 - DNA, 2609 bp, Escherichia coli
gcaacgtcaggctatggcaatggattttagctggcaggtcgcggcgaagtcgtaccgtgagctttactatcgcttgaaatagttttcaggaaacgcctatttgacggctagctcagtcctaggtacagtgctagctaagtaggtacgtaaggaggtgataaatgaatgctccgtttacatattcatcgcccacgcttagcgtagaagctcttaagcactctatcgcttacaagctgatgtttacgattggaaaggacccggtcgtcgccaataaacatgaatggctgaacgcaacgttatttgctgtgcgcgatcgtctcgtggagcgctggttacgttcaaaccgtgcccagttgtcgcaagaaactcgtcaggtttactacctgtcgatggagtttttgattggccgtacgctctccaacgccatgttgtcgctaggaatttacgaagatgtacagggcgcactggaagcgatggggttaaatctcgaagagctgattgatgaagaaaatgacccaggcctcggtaacggtggcctgggacgtctggcggcttgcttccttgattctctggcgacgttagggttgccggggcgcggttacggcatccgctatgactacggtatgttcaagcagaacatcgttaacggtagccagaaagagtcgccagactactggctggaatacggtaacccgtgggaattcaaacgccacaacacgcgctataaagtccgttttggcggtcgcattcagcaggaaggtaaaaaaacgcgctggattgaaaccgaagagattctgggagtcgcttacgatcagataatccctggttacgacaccgacgcgaccaacacgctgcgtttgtggagtgcgcaagccagtagcgaaattaacctcggtaaattcaaccagggtgactacttcgcggcagtggaagataaaaaccactccgagaacgtatctcgcgtactgtatccggatgactccacctactccgggcgtgagctgcgcctgcgtcaggaatacttcctggtttcctcgaccattcaggacattttaagccgccattatcagttgcataaaacctacgataacctggcggataaaatcgcgattcatctcaatgatacccatccggtactgtcgattcctgagatgatgcgtctgctgatcgatgagcaccaatttagctgggacgacgcgtttgaggtgtgttgtcaggtcttctcctacactaaccacacgctgatgagcgaggcgctggaaacctggccggttgatatgctgggtaaaattctgccgcgtcacctgcagatcatctttgaaatcaacgactatttcctgaaaaccttgcaggaacagtatccgaacgataccgatctgctgggacgggcgtcgatcattgatgaatccaacggtcgtcgtgtgcgtatggcctggctggcggttgttgtgagccacaaagttaacggtgtatcggaactgcactctaatctgatggtgcaatcgttgtttgccgactttgcgaaaatcttcccgggtcgtttcaccaacgtcaccaacggtgtgacgccgcgtcgctggctggcggtagcgaacccatcgctttcagccgtgctggacgaacacctgggccgtaactggcgcaccgaccttagcctgcttaatgagctgcaacaacactgtgatttcccaatggttaatcacgctgtgcatcaggcgaagctggagaacaaaaagcgtctggcagagtatatcgcccagcagctgaatgtggtggtgaatccaaaggcgttgttcgatgtacaaatcaaacgtattcacgaatacaaacgtcaattgatgaatgtgttgcatgtgattacccgctataaccgcatcaaggccgacccggatgcgaagtgggtaccgcgcgtgaatatttttggcggtaaggcggcttcggcctattacatggcgaagcacattattcatttgatcaatgacgtagcgaaagtgatcaacaacgatccgcagattggcgataagctgaaagtcgtgttcatcccgaactacagcgttagcctggcgcagttgatcattccggcggcagatctgtctgaacagatttcgctggcagggacggaagcttccggcaccagtaacatgaagtttgcgcttaacggtgcgctgactatcggtacgttggacggtgcgaatgtcgagatgctggatcatgtcggtgctgacaatatctttatttttggtaacacagcggaagaagtggaagaactgcgtcgtcagggctacaaaccgcgtgaatactacgagaaagatgaggagctgcatcaggtgctgacgcaaatcggcagcggtgtattcagtccggaagatccgggtcgctatcgcgatctggttgattcgctgatcaacttcggcgatcactaccaggtactggcggattatcgcagctatgtcgattgtcaggataaagtcgatgaactctacgagcttcaggaagagtggaccgcaaaagcgatgctgaacattgccaatatgggctacttctcttctgaccgtactatcaaagagtacgccgatcatatctggcatatcgatccggtgagattgtaa

SEQ ID NO: 107 - DNA, 1493 bp, Escherichia coli
tgataaaaaagtcgctctcgcataaaatttacacttgcaccctgcgaaaaaacagaataaaaatacactaatttcgaataatcatgcaaagaggtgtgccttgacggctagctcagtcctaggtacagtgctagctaagtaggtacgtaaggaggtgataagtggtaaaggaacgtaaaaccgagttggtcgagggattccgccattcggttccctatatcaatacccaccggggaaaaacgtttgtcatcatgctcggcggtgaagccattgagcatgagaatttctccagtatcgttaatgatatcgggttgttgcacagcctcggcatccgtctggtggtggtctatggcgcacgtccgcagatcgacgcaaatctggctgcgcatcaccacgaaccgctgtatcacaagaatatacgtgtgaccgacgccaaaacactggaactggtgaagcaggctgcgggaacattgcaactggatattactgctcgcctgtcgatgagtctcaataacacgccgctgcagggcgcgcatatcaacgtcgtcagtggcaattttattattgcccagccgctgggcgtcgatgacggcgtggattactgccatagcgggcgtatccggcggattgatgaagacgcgatccatcgtcaactggacagcggtgcaatagtgctaatggggccggtcgctgtttcagtcactggcgagagctttaacctgacctcggaagagattgccactcaactggccatcaaactgaaagctgaaaagatgattggtttttgctcttcccagggcgtcactaatgacgacggtgatattgtctccgaacttttccctaacgaagcgcaagcgcgggtagaagcccaggaagagaaaggcgattacaactccggtacggtgcgctttttgcgtggcgcagtgaaagcctgccgcagcggcgtgcgtcgctgtcatttaatcagttatcaggaagatggcgcgctgttgcaagagttgttctcacgcgacggtatcggtacgcagattgtgatggaaagcgccgagcagattcgtcgcgcaacaatcaacgatattggcggtattctggagttgattcgcccactggagcagcaaggtattctggtacgccgttctcgcgagcagctggagatggaaatcgacaaattcaccattattcagcgcgataacacgactattgcctgcgccgcgctctatccgttcccggaagagaagattggggaaatggcctgtgtggcagttcacccggattaccgcagttcatcaaggggtgaagttctgctggaacgcattgccgctcaggcgaagcagagcggcttaagcaaattgtttgtgctgaccacgcgcagtattcactggttccaggaacgtggatttaccccagtggatattgatttactgcccgagagcaaaaagcagttgtacaactaccagcgtaaatccaaagtgttgatggcggatttagggtaa

SEQ ID NO: 108 - DNA, 1094 bp, Escherichia coli
tggagaaaagcattgcgtggcctcgtaatcgctatatctactattatgtcgcctgaaacccacttcgcggtgggttttttgttgtcaggagttttaataactgatagctagctcagtcctagggattatgctagctaagtaggtacgtaaggaggtgataaatggcagagcaaacctcgcgtctcgcaataattattgatagcactggagcgaaaaataatgctgacaatctgacctcctcattagtcaaaatgacgcaggctggggaaactgctgcaaatagcgcagggaaagtgactaaggcaacagaagatgagaagaacgcgctcgcaaaattaaaagcagctattgatccagttggtgccgcaattgatactgtcggtcgacgctattctgaattaaagaaatttttcgataaagggcttattgataaagaagaatatgaatttcttgtccgtaaacttaatgaaaccacagaggaattgagcggggttgcgcaagcgcagagagaagccgagaaggccggaaaacttgctgccgctcagcaggaagcgcaggctcaggcctttcaaagaatgctggacaagatcgaccctctggctgcggcgctaagaaatcttgaacaacagcatgatgaacttaatgctgcgtttgcatccgggaaaataaatggttctcagtttgagaattatagccgaaaaatacaggaaacacggcgagagcttaccggagaggctcaggcagagcgagaagcagcaaaagcgcatgatgaacaggttgttgctttgcaacgtctgattgctcaacttgatcctgtcggaactgcttttaatcgtctggtagaacaacagaaacagctcaatgaagcaaaagctaaggggatgctttctcctgaaatgtatgaggagctttctggaaaacttcgtgctatgcggagtgagcttgaggttactcaatcacaattaagcaaaaccggaatgtcggcaaaacaaacggcttttgctatgcgcatgttgcctgcacaaatgacggatattgttgttgggttgtccactggtcagtcgccatttatggtgttaatgcagcagggcggc

SEQ ID NO: 109 - DNA, 905 bp, Escherichia coli
gactggcgcatcaggagcgcccgacggcaggcagcacgctgtggctgcatctggcggaaaatcagctgcatctttttgatggtgaaacaggacaacgagtctgatagctagctcagtcctagggattatgctagctaagtaggtacgtaaggaggtgataaatgagtaactggccttatccccgcatcgtcgctcatcgtggcggcggtaagctggccccggaaaacaccctggcgtcaatcgacgtcggggcaaaatacggtcataagatgatcgaatttgacgcgaagttatcgaaagatggcgagatcttcctgctccatgacgacaatctcgaacgtaccagcaacggctggggcgtcgcgggtgaactgaactggcaggatttactgcgcgtggatgcgggcagttggtacagcaaaatgtttaaaggtgagccgctaccgttgctttcgcaggtggcggaacgttgccgcgaacacgggatgatggcgaatatcgaaatcaaacccaccaccggcaccgggccattaacgggcaaaatggtggcgctggcggcacgcgagctgtgggccggtatgacgccgccgctgctgtcatcgtttgagattgatgctttagaagctgcacaacaggcggcaccggaactgccgcgcggtttgttgctggatgagtggcgcgacgactggcgcgaactgaccgcgcggctgggctgcgtctctattcatctcaatcataagttactcaataaagcgcgagtgatgcagttgaaagacgccggactgcggattctggtttataccgtcaataaaccccagcgcgcagcagagttgctgcgctggggtgtggattgcatctgtaccgatgcgattgacgtgattggtccgaactttacggcccaatag

SEQ ID NO: 110 - DNA, 353 bp, Escherichia coli
aaagttctaaaccggtcatcaatgccgagcacgatggtcgccactggcgacgaataccagaacccatgcgactgttagatgatgctgtggagcgctcatcctgatagctagctcagtcctagggattatgctagctaagtaggtacgtaaggaggtgataaatgatgaccatcagcgatatcattgaaattattgtcgtttgcgcactgatatttttcccgctgggctatctggcgcggcactctttgcgacgcattcgcgacaccttacgtttgttctttgctaaacctcgttatgttaaaccggccgggacgttacgccgcacggaaaaagccagggcaaccaaaaaatga

SEQ ID NO: 111 - protein, 917 aa, Escherichia coli
CATCTGTTTGCCGGGCATCGCGTCTAAGGTAAAGCGGGCAGAAACCTCGGAAATACGCTCGGCCCCTTTGGTGACGACAATAAAGTTGATTGTCAACAGCCTGATAGCTAGCTCAGTCCTAGGGATTATGCTAGCTAAGTAGGTACGTAAGGAGGTGATAAGTCAGTAAATCCGAGCGTGAAAGCATTATCGCCGCGCTGCACGGGCAGTCGATTTTTAACGGTGGTGGGCTGTCGCCGTTAAATAAAATCAGCCCGTCTCATCCGCCAAAACCTGCCACCGTGGCGGTGCCGGAAGAGACGGAGAAAAAAGCGCGTGATGTGAATGAGAAAACGGCGCTGCTGAAGAAGAAATCCGCCACCGAGCTTGGTGAGCTGGCAACCAGTATCAACACCATTGCCCGTGATGCGCATATGGAAGCGAATCTGGAGATGGAGATTGTTCCCCAGGGATTACGCGTGCTGATTAAAGACGACCAGAACCGCAATATGTTTGAACGCGGCAGCGCGAAGATTATGCCGTTCTTTAAAACGCTGCTGGTGGAGCTCGCGCCAGTGTTCGACTCGCTCGATAATAAAATTATTATTACCGGGCATACCGATGCGATGGCCTACAAAAACAATATCTACAACAACTGGAACCTTTCGGGTGACCGCGCGCTTTCGGCTCGTCGGGTGCTGGAAGAGGCCGGAATGCCGGAAGATAAAGTGATGCAGGTAAGCGCAATGGCGGACCAGATGCTGCTGGATTCCAAAAATCCGCAAAGCGCGGGCAACCGGCGCATTGAGATTATGGTGCTGACCAAAAGTGCGTCCGATACGCTGTATCAATACTTTGGTCAGCATGGGGATAAAGTGGTGCAGCCGCTGGTGCAAAAGCTGGATAAGCAGCAGGTGCTTTCGCAGCGAACGCGTTAA

SEQ ID NO: 112 - protein, 662 aa, Escherichia coli
GTAGTGGGGATGCCAGATTTACACCCCGGACGCGGCTACCCGATTGGCGCAGCGTTCTTCTCTGTTGGTCGTTTTTACCCGGCAAGACGTCGCGGTAACGCTGATAGCTAGCTCAGTCCTAGGGATTATGCTAGCTAAGTAGGTACGTAAGGAGGTGATAAGTGCTGGAAACAGAAACGGGCCGCTACTCTGACACACTGCGTTCGGCGCTGGTTTCTCTCGATGGCGATAACGCATGGGCATTAAGCGAAAGCTGGTGTGGCACTATTCAGTGGATTTGTCCGAGTCCGTATCGGCCTCATCATGGGCGCAAAAACTGGTTTCTGGGCATTGGGCGTTTTACCGCTGATGAGCAGGAACAATCGGATGCAATCCGTTATGAGACGCTGCGTTCGTCGGGGCCGGGCGGTCAACATGTCAATAAAACCGACTCGGCGGTACGCGCCACGCATTTGGCATCCGGTATTAGCGTGAAGGTTCAGTCAGAGCGTAGTCAGCATGCTAACAAGCGGCTGGCACGATTGCTGATTGCCTGGAAGCTGGAGCAACAGCAACAGGAAAATAGCGCGGCGCTGAAATCGCAGCGGCGAATGTTCCATCACCAGATTGAACGTGGCAACCCGCGACGGACATTTACAGGGATGGCTTTTATCGAAGGATAA

SEQ ID NO: 113 - DNA, 824 bp, Escherichia coli
ttatctgtaccgtgccaattatggctcgctggaaaaagctggtattgtggcaaaaaacacccgttcataatacgcgctgatcatgatcaggagtcacacctttacggctagctcagtcctaggtatagtgctagctaagtaggtacgtaaggaggtgataaatgaccattacgtctctggatggctatcgctggctgaagaacgatattattcgcggtaattttcaaccggatgaaaaattacgaatgagtttgctgacatcgcgttatgcacttggcgttgggccgttacgggaagctctttcgcaactggtggcggaacggctggtcacggtggtgaatcaaaaagggtatcgggtggcgtctatgtcagagcaggagctgctcgatattttcgacgcccgcgccaatatggaagcgatgttagtgagtctggcgattgcccgcggtggcgatgagtgggaggcagacgttctcgcaaaagcgcatctgctgagtaagcttgaggcctgtgacgccagcgagaaaatgcttgatgagtgggatctgcgtcatcaggcgtttcatacggcaattgtggcgggctgtggttctcactatttgctgcaaatgcgtgaacggttgtttgatctggcggcgcgttatcgatttatctggctgcggcgaacggtgctttcggtggaaatgctggaggataaacacgatcagcaccagaccctgactgcggcggtactggcgcgagataccgcgcgcgccagtgagttaatgcgccagcatttactgacgccaattcccattatccagcaggcgatggctggcaattaa

SEQ ID NO: 114 - DNA, 389 bp, Escherichia coli
ttatttaatctctcctttgttggcaaatcatctggtctcatgtcgctgtcaaacgccccatgaggtagttatccagttaatgagaaacaagtaggcaccttttacggctagctcagtcctaggtatagtgctagctaagtaggtacgtaaggaggtgataaatgcaatacactccagatactgcgtggaaaatcactggcttttcccgtgaaatcagcccggcatatcgccaaaaactgctttctcttggcatgttacctggctcctcttttaatgtggtgcgcgtcgctccactcggcgaccccattcatatcgaaacccgtcgtgtgagcctggtattacgcaaaaaagatctggccttattagaagtggaagcggtttcctgttaa

SEQ ID NO: 115 - protein, 2609 aa, Escherichia coli
GCAACGTCAGGCTATGGCAATGGATTTTAGCTGGCAGGTCGCGGCGAAGTCGTACCGTGAGCTTTACTATCGCTTGAAATAGTTTTCAGGAAACGCCTATTTTACGGCTAGCTCAGTCCTAGGTATAGTGCTAGCTAAGTAGGTACGTAAGGAGGTGATAAATGAATGCTCCGTTTACATATTCATCGCCCACGCTTAGCGTAGAAGCTCTTAAGCACTCTATCGCTTACAAGCTGATGTTTACGATTGGAAAGGACCCGGTCGTCGCCAATAAACATGAATGGCTGAACGCAACGTTATTTGCTGTGCGCGATCGTCTCGTGGAGCGCTGGTTACGTTCAAACCGTGCCCAGTTGTCGCAAGAAACTCGTCAGGTTTACTACCTGTCGATGGAGTTTTTGATTGGCCGTACGCTCTCCAACGCCATGTTGTCGCTAGGAATTTACGAAGATGTACAGGGCGCACTGGAAGCGATGGGGTTAAATCTCGAAGAGCTGATTGATGAAGAAAATGACCCAGGCCTCGGTAACGGTGGCCTGGGACGTCTGGCGGCTTGCTTCCTTGATTCTCTGGCGACGTTAGGGTTGCCGGGGCGCGGTTACGGCATCCGCTATGACTACGGTATGTTCAAGCAGAACATCGTTAACGGTAGCCAGAAAGAGTCGCCAGACTACTGGCTGGAATACGGTAACCCGTGGGAATTCAAACGCCACAACACGCGCTATAAAGTCCGTTTTGGCGGTCGCATTCAGCAGGAAGGTAAAAAAACGCGCTGGATTGAAACCGAAGAGATTCTGGGAGTCGCTTACGATCAGATAATCCCTGGTTACGACACCGACGCGACCAACACGCTGCGTTTGTGGAGTGCGCAAGCCAGTAGCGAAATTAACCTCGGTAAATTCAACCAGGGTGACTACTTCGCGGCAGTGGAAGATAAAAACCACTCCGAGAACGTATCTCGCGTACTGTATCCGGATGACTCCACCTACTCCGGGCGTGAGCTGCGCCTGCGTCAGGAATACTTCCTGGTTTCCTCGACCATTCAGGACATTTTAAGCCGCCATTATCAGTTGCATAAAACCTACGATAACCTGGCGGATAAAATCGCGATTCATCTCAATGATACCCATCCGGTACTGTCGATTCCTGAGATGATGCGTCTGCTGATCGATGAGCACCAATTTAGCTGGGACGACGCGTTTGAGGTGTGTTGTCAGGTCTTCTCCTACACTAACCACACGCTGATGAGCGAGGCGCTGGAAACCTGGCCGGTTGATATGCTGGGTAAAATTCTGCCGCGTCACCTGCAGATCATCTTTGAAATCAACGACTATTTCCTGAAAACCTTGCAGGAACAGTATCCGAACGATACCGATCTGCTGGGACGGGCGTCGATCATTGATGAATCCAACGGTCGTCGTGTGCGTATGGCCTGGCTGGCGGTTGTTGTGAGCCACAAAGTTAACGGTGTATCGGAACTGCACTCTAATCTGATGGTGCAATCGTTGTTTGCCGACTTTGCGAAAATCTTCCCGGGTCGTTTCACCAACGTCACCAACGGTGTGACGCCGCGTCGCTGGCTGGCGGTAGCGAACCCATCGCTTTCAGCCGTGCTGGACGAACACCTGGGCCGTAACTGGCGCACCGACCTTAGCCTGCTTAATGAGCTGCAACAACACTGTGATTTCCCAATGGTTAATCACGCTGTGCATCAGGCGAAGCTGGAGAACAAAAAGCGTCTGGCAGAGTATATCGCCCAGCAGCTGAATGTGGTGGTGAATCCAAAGGCGTTGTTCGATGTACAAATCAAACGTATTCACGAATACAAACGTCAATTGATGAATGTGTTGCATGTGATTACCCGCTATAACCGCATCAAGGCCGACCCGGATGCGAAGTGGGTACCGCGCGTGAATATTTTTGGCGGTAAGGCGGCTTCGGCCTATTACATGGCGAAGCACATTATTCATTTGATCAATGACGTAGCGAAAGTGATCAACAACGATCCGCAGATTGGCGATAAGCTGAAAGTCGTGTTCATCCCGAACTACAGCGTTAGCCTGGCGCAGTTGATCATTCCGGCGGCAGATCTGTCTGAACAGATTTCGCTGGCAGGGACGGAAGCTTCCGGCACCAGTAACATGAAGTTTGCGCTTAACGGTGCGCTGACTATCGGTACGTTGGACGGTGCGAATGTCGAGATGCTGGATCATGTCGGTGCTGACAATATCTTTATTTTTGGTAACACAGCGGAAGAAGTGGAAGAACTGCGTCGTCAGGGCTACAAACCGCGTGAATACTACGAGAAAGATGAGGAGCTGCATCAGGTGCTGACGCAAATCGGCAGCGGTGTATTCAGTCCGGAAGATCCGGGTCGCTATCGCGATCTGGTTGATTCGCTGATCAACTTCGGCGATCACTACCAGGTACTGGCGGATTATCGCAGCTATGTCGATTGTCAGGATAAAGTCGATGAACTCTACGAGCTTCAGGAAGAGTGGACCGCAAAAGCGATGCTGAACATTGCCAATATGGGCTACTTCTCTTCTGACCGTACTATCAAAGAGTACGCCGATCATATCTGGCATATCGATCCGGTGAGATTGTAA

SEQ ID NO: 116 - protein, 292 aa, Escherichia coli
MFTGSIVAIVTPMDEKGNVCRASLKKLIDYHVASGTSAIVSVGTTGESATLNHDEMADVVMMTLDLADGRIPVIAGTGANATAEAISLTQRFNDSGIVGCLTVTPYYNRPSQEGLYQHFKAIAEHTDLPQILYNVPSRTGCDLLPETVGRLAKVKNIIGIKEATGNLTRVNQIKELVSDDFVLLSGDDASALDFMQLGGHGVISVTANVAARDMAQMCKLAAEGHFAEARVINQRLMPLHNKLFVEPNPIPVKWACKELGLVATDTLRLPMTPITDSGRETVRAALKHAGLL

SEQ ID NO: 117 - protein, 292 aa, Escherichia coli
MFTGSIVAIVTPMDEKGNVCRASLKKLIDYHVASGTSAIVSVGTTGESATLNHDEHADVVMMTLDLADGRIPVIAGTGENATAEAISLTQRFNDSGIVGCLTVTPYYNRPSQEGLYQHFKAIAEHTDLPQILYNVPSRTGCDLLPETVGRLAKVKNIIGIKEATGNLTRVNQIKELVSDDFVLLSGDDASALDFMQLGGHGVISVTANVAARDMAQMCKLAAEGHFAEARVINQRLMPLHNKLFVEPNPIPVKWACKELGLVATDTLRLPMTPITDSGRETVRAALKHAGLL

SEQ ID NO: 118 - protein, 292 aa, Escherichia coli
MFTGSIVAIVTPMDEKGNVCRASLKKLIDYHVASGTSAIVSVGTTGESATLNHDEKADVVMMTLDLADGRIPVIAGTGANATAEAISLTQRFNDSGIVGCLTVTPYYNRPSQEGLYQHFKAIAEHTDLPQILYNVPSRTGCDLLPETVGRLAKVKNIIGIKEATGNLTRVNQIKELVSDDFVLLSGDDASALDFMQLGGHGVISVTANVAARDMAQMCKLAAEGHFAEARVINQRLMPLHNKLFVEPNPIPVKWACKELGLVATDTLRLPMTPITDSGRETVRAALKHAGLL

SEQ ID NO: 119 - protein, 292 aa, Escherichia coli
MFTGSIVAIVTPMDEKGNVCRASLKKLIDYHVASGTSAIVSVGTTGESATLNHDEHADVVMMTLDLADGRIPVIAGTGAHATAEAISLTQRFNDSGIVGCLTVTPYYNRPSQEGLYQHFKAIAEHTDLPQILYNVPSRTGCDLLPETVGRLAKVKNIIGIKEATGNLTRVNQIKELVSDDFVLLSGDDASALDFMQLGGHGVISVTANVAARDMAQMCKLAAEGHFAEARVINQRLMPLHNKLFVEPNPIPVKWACKELGLVATDTLRLPMTPITDSGRETVRAALKHAGLL

SEQ ID NO: 120 - protein, 292 aa, Escherichia coli
MFTGSIVAIVTPMDEKGNVCRASLKKLIDYHVASGTSAIVSVGTTGESATLNHDEHADVVMMTLDLADGRIPVIAGTGVNATAEAISLTQRFNDSGIVGCLTVTPYYNRPSQEGLYQHFKAIAEHTDLPQILYNVPSRTGCDLLPETVGRLAKVKNIIGIKEATGNLTRVNQIKELVSDDFVLLSGDDASALDFMQLGGHGVISVTANVAARDMAQMCKLAAEGHFAEARVINQRLMPLHNKLFVEPNPIPVKWACKELGLVATDTLRLPMTPITDSGRETVRAALKHAGLL

SEQ ID NO: 121 - protein, 292 aa, Escherichia coli; identical to SEQ ID NO: 120

SEQ ID NO: 122 - protein, 292 aa, Escherichia coli
MFTGSIVAIVTPMDEKGNVCRASLKKLIDYHVASGTSAIVSVGTTGESATLNHDETADVVMMTLDLADGRIPVIAGTGANATAEAISLTQRFNDSGIVGCLTVTPYYNRPSQEGLYQHFKAIAEHTDLPQILYNVPSRTGCDLLPETVGRLAKVKNIIGIKEATGNLTRVNQIKELVSDDFVLLSGDDASALDFMQLGGHGVISVTANVAARDMAQMCKLAAEGHFAEARVINQRLMPLHNKLFVEPNPIPVKWACKELGLVATDTLRLPMTPITDSGRETVRAALKHAGLL

SEQ ID NO: 123 - protein, 292 aa, Escherichia coli
MFTGSIVAIVTPMDEKGNVCRASLKKLIDYHVASGTSAIVSVGTTGESATLNHDEHADVVMMTLDLADGRIPVIAGTGLNATAEAISLTQRFNDSGIVGCLTVTPYYNRPSQEGLYQHFKAIAEHTDLPQILYNVPSRTGCDLLPETVGRLAKVKNIIGIKEATGNLTRVNQIKELVSDDFVLLSGDDASALDFMQLGGHGVISVTANVAARDMAQMCKLAAEGHFAEARVINQRLMPLHNKLFVEPNPIPVKWACKELGLVATDTLRLPMTPITDSGRETVRAALKHAGLL

SEQ ID NO: 124 - protein, 274 aa, Escherichia coli
MQFSKMHGLGNDFMVVDAVTQNVFFSPELIRRLADRHLGVGFDQELVVEPPYDPELDFHYRIFNADGSEVAQCGNGARCFARFVRLKGLTNKRDIRVSTANGRMVLTVTDDDLVRVNMGEPNFEPSAVPFRANKAEKTYIMRAAEQTILCGVVSMGNPHCVIQVDDVDTAAVETLGPVLESHERFPERANIGFMQVVKREHIRLRVYERGAGETQACGSGACAAVAVGIQQGLLAEEVRVELPGGRLDIAWKGPGHPLYMTGPAVHVYDGFIHL

SEQ ID NO: 125 - protein, 540 aa, Escherichia coli
MRVNNGLTPQELEAYGISDVHDIVYNPSYDLLYQEELDPSLTGYERGVLTNLGAVAVDTGIFTGRSPKDKYIVRDDTTRDTFWWADKGKGKNDNKPLSPETWQHLKGLVTRQLSGKRLFVVDAFCGANPDTRLSVRFITEVAWQAHFVKNMFIRPSDEELAGFKPDFIVMNGAKCTNPQWKEQGLNSENFVAFNLTERMQLIGGTWYGGEMKKGMFSMMNYLLPLKGIASLHCSANVGEKGDVAVFFGLSGTGKTTLSTDPKRRLIGDDEHGWDDDGVFNFEGGCYAKTIKLSKEAEPEIYNAIRRDALLENVTVREDGTIDFDDGSKTENTRVSYPIYHIDNIVKPVSKAGHATKVIFLTADAFGVLPPVSRLTADQTQYHFLSGFTAKLAGTERGITEPTPTFSACFGAAFLSLHPTQYAEVLVKRMQAAGAQAYLVNTGWNGTGKRISIKDTRAIIDAILNGSLDNAETFTLPMFNLAIPTELPGVDTKILDPRNTYASPEQWQEKAETLAKLFIDNFDKYTDTPAGAALVAAGPKL

SEQ ID NO: 126 - protein, 540 aa, Escherichia coli
MRVNNGLTPQELEAYGISDVHDIVYNPSYDLLYQEELDPSLTGYERGVLTNLGAVAVDTGIFTGRSPKDKYIVRDDTTRDTFWWADKGKGKNDNKPLSPETWQHLKVLVTRQLSGKRLFVVDAFCGANPDTRLSVRFITEVAWQAHFVKNMFIRPSDEELAGFKPDFIVMNGAKCTNPQWKEQGLNSENFVAFNLTERMQLIGGTWYGGEMKKGMFSMMNYLLPLKGIASMHCSANVGEKGDVAVFFGLSGTGKTTLSTDPKRRLIGDDEHGWDDDGVFNFEGGCYAKTIKLSKEAEPEIYNAIRRDALLENVTVREDGTIDFDDGSKTENTRVSYPIYHIDNIVKPVSKAGHATKVIFLTADAFGVLPPVSRLTADQTQYHFLSGFTAKLAGTERGITEPTPTFSACFGAAFLSLHPTQYAEVLVKRMQAAGAQAYLVNTGWNGTGKRISIKDTRAIIDAILNGSLDNAETFTLPMFNLAIPTELPGVDTKILDPRNTYASPEQWQEKAETLAKLFIDNFDKYTDTPAGAALVAAGPKL

SEQ ID NO: 127 - protein, 292 aa, Escherichia coli
MFTGSIVAIVTPMDEKGNVCRASLKKLIDYHVASGTSAIVSVGTTGESATLNHDEEADVVMMTLDLADGRIPVIAGTGANATAEAISLTQRFNDSGIVGCLTVTPYYNRPSQEGLYQHFKAIAEHTDLPQILYNVPSRTGCDLLPETVGRLAKVKNIIGIKEATGNLTRVNQIKELVSDDFVLLSGDDASALDFMQLGGHGVISVTANVAARDMAQMCKLAAEGHFAEARVINQRLMPLHNKLFVEPNPIPVKWACKELGLVATDTLRLPMTPITDSGRETVRAALKHAGLL

SEQ ID NO: 128 - protein, 292 aa, Escherichia coli
MFTGSIVAIVTPMDEKGNVCRASLKKLIDYHVASGTSAIVSVGTTGESATLNHDEHADVVMMTLDLADGRIPVIAGTGAQATAEAISLTQRFNDSGIVGCLTVTPYYNRPSQEGLYQHFKAIAEHTDLPQILYNVPSRTGCDLLPETVGRLAKVKNIIGIKEATGNLTRVNQIKELVSDDFVLLSGDDASALDFMQLGGHGVISVTANVAARDMAQMCKLAAEGHFAEARVINQRLMPLHNKLFVEPNPIPVKWACKELGLVATDTLRLPMTPITDSGRETVRAALKHAGLL

SEQ ID NO: 129 - protein, 292 aa, Escherichia coli
MFTGSIVAIVTPMDEKGNVCRASLKKLIDYHVASGTSAIVSVGTTGESATLNHDEHADVVMMTLDLADGRIPVIAGTGNNATAEAISLTQRFNDSGIVGCLTVTPYYNRPSQEGLYQHFKAIAEHTDLPQILYNVPSRTGCDLLPETVGRLAKVKNIIGIKEATGNLTRVNQIKELVSDDFVLLSGDDASALDFMQLGGHGVISVTANVAARDMAQMCKLAAEGHFAEARVINQRLMPLHNKLFVEPNPIPVKWACKELGLVATDTLRLPMTPITDSGRETVRAALKHAGLL

SEQ ID NO: 130 - protein, 540 aa, Escherichia coli
MRVNNGLTPQELEAYGISDVHDIVYNPSYDLLYQEELDPSLTGYERGVLTNLGAVAVDTGIFTGRSPKDKYIVRDDTTRDTFWWADKGKGKNDNKPLSPETWQHLKGLVTRQLSGKRLFVVDAFCGANPDTRLSVRFITEVAWQAHFVKNMFIRPSDEELAGFKPDFIVMNGAKCTNPQWKEQGLNSENFVAFNLTERMQLIGGTWYGGEMKKGMFSMMNYLLPLKGIASMLCSANVGEKGDVAVFFGLSGTGKTTLSTDPKRRLIGDDEHGWDDDGVFNFEGGCYAKTIKLSKEAEPEIYNAIRRDALLENVTVREDGTIDFDDGSKTENTRVSYPIYHIDNIVKPVSKAGHATKVIFLTADAFGVLPPVSRLTADQTQYHFLSGFTAKLAGTERGITEPTPTFSACFGAAFLSLHPTQYAEVLVKRMQAAGAQAYLVNTGWNGTGKRISIKDTRAIIDAILNGSLDNAETFTLPMFNLAIPTELPGVDTKILDPRNTYASPEQWQEKAETLAKLFIDNFDKYTDTPAGAALVAAGPKL

SEQ ID NO: 131 - protein, 292 aa, Escherichia coli
MFTGSIVAIVTPMDEKGNVCRASLKKLIDYHVASGTSAIVSVGTTGESATLNHDEHADVVMMTLDLADGRIPVIAGTGYNATAEAISLTQRFNDSGIVGCLTVTPYYNRPSQEGLYQHFKAIAEHTDLPQILYNVPSRTGCDLLPETVGRLAKVKNIIGIKEATGNLTRVNQIKELVSDDFVLLSGDDASALDFMQLGGHGVISVTANVAARDMAQMCKLAAEGHFAEARVINQRLMPLHNKLFVEPNPIPVKWACKELGLVATDTLRLPMTPITDSGRETVRAALKHAGLL

SEQ ID NO: 132 - protein, 292 aa, Escherichia coli
MFTGSIVAIVTPMDEKGNVCRASLKKLIDYHVASGTSAIVSVGTTGESATLNHDEYADVVMMTLDLADGRIPVIAGTGANATAEAISLTQRFNDSGIVGCLTVTPYYNRPSQEGLYQHFKAIAEHTDLPQILYNVPSRTGCDLLPETVGRLAKVKNIIGIKEATGNLTRVNQIKELVSDDFVLLSGDDASALDFMQLGGHGVISVTANVAARDMAQMCKLAAEGHFAEARVINQRLMPLHNKLFVEPNPIPVKWACKELGLVATDTLRLPMTPITDSGRETVRAALKHAGLL

SEQ ID NO: 133 - protein, 292 aa, Escherichia coli
MFTGSIVAIVTPMDEKGNVCRASLKKLIDYHVASGTSAIVSVGTTGESATLNHDEHADVVMMTLDLADGRIPVIAGTGANATAEAISSTQRFNDSGIVGCLTVTPYYNRPSQEGLYQHFKAIAEHTDLPQILYNVPSRTGCDLLPETVGRLAKVKNIIGIKEATGNLTRVNQIKELVSDDFVLLSGDDASALDFMQLGGHGVISVTANVAARDMAQMCKLAAEGHFAEARVINQRLMPLHNKLFVEPNPIPVKWACKELGLVATDTLRLPMTPITDSGRETVRAALKHAGLL

SEQ ID NO: 134 - protein, 292 aa, Escherichia coli
MFTGSIVAIVTPMDEKGNVCRASLKKLIDYHVASGTSAIVSVGTTGESATLNHDEHADVVMMTLDLADGRIPVIAGTGANATANAISLTQRFNDSGIVGCLTVTPYYNRPSQEGLYQHFKAIAEHTDLPQILYNVPSRTGCDLLPETVGRLAKVKNIIGIKEATGNLTRVNQIKELVSDDFVLLSGDDASALDFMQLGGHGVISVTANVAARDMAQMCKLAAEGHFAEARVINQRLMPLHNKLFVEPNPIPVKWACKELGLVATDTLRLPMTPITDSGRETVRAALKHAGLL

SEQ ID NO: 135 - protein, 420 aa, Escherichia coli
MPHSLFSTDTDLTAENLLRLPAEFGCPVWVYDAQIIRRQIAALKQFDVVRFAQKACSNIHILRLMREQGVKVDSVSLGEIERALAAGYNPQTHPDDIVFTADVIDQATLERVSELQIPVNAGSVDMLDQLGQVSPGHRVWLRVNPGFAHGHSQKTNTGGENSKHGIWYTDLPAALDVIQRHHLQLVGIHMHIGSGVDYAHLEQVCGAMVRQVIEFGQDLQAISAGGGLSVPYQQGEEAVDTEHYYGLWNAAREQIARHLGHPVKLEIEPGRFLVAQSGVLITQVRSVKQMGSRHFVLVDAGFNDLMRPAMYGSYHHISALAADGRSLEHAPTVETVVAGPLCESGDVFTQQEGGNVETRALPEVKAGDYLVLHDTGAYGASMSSNYNSRPLLPEVLFDNGQARLIRRRQTIEELLALELL

SEQ ID NO: 136 - protein, 274 aa, Escherichia coli
MQFSKMHGLGNDFMVVDAVTQNVFFSPELIRRLADRHLGVGFDQLLVVEPPYDPELDFHYRIFNADGSEVAQCGNGARCFARFVRLKGLTNKRDIRVSTANGRMVLTVTDDDLVRVNMGEPNFEPSAVPFRANKAEKTYIMRAAEQTILCGVVSMGNPHCVIQVDDVDTAAVETLGPVLESHERFPERAIIGFMQVVKREHIRLRVYERGAGETQACGSGACAAVAVGIQQGLLAEEVRVELPGGRLDIAWKGPGHPLYMTGPAVHVYDGFIHL

SEQ ID NO: 137 - protein, 449 aa, Escherichia coli
MSEIVVSKFGGTSVADFDAMNRSADIVLSDANVRLVVLSASAGITNLLVALAEGLEPGERFEKLDAIRNIQFAILERLRYPNVIREEIERLLENITVLAEAAALATSPALTDELVSHGELMSTLLFVEILRERDVQAQWFDVRKVMRTNDRFGRAEPDIAALAELAALQLLPRLNEGLVITQGFIGSENKGRTTTLGRGGSDYTAALLAEALHASRVDIWTDVPGIYTTDPRVVSAAKRIDEIAFAEAAEMATFGAKVLHPATLLPAVRSDIPVFVGSSKDPRAGGTLVCNKTENPPLFRALALRRNQTLLTLHSLNMLHSRGFLAEVFGILARHNISADLITTSEVSVALTLDTTGSTSTGDTLLTQSLLMELSALCRVEVEEGLALVALIGNDLSKACGVGKEVFGVLEPFNIRMICYGASSHNLCFLVPGEDAEQVVQKLHSNLFE

SEQ ID NO: 138 - DNA, 983 bp, Escherichia coli
gatatcaatttcagagcctggctacaggcgaaaagcggccgtgatgtgacgatcggtgaatttaccgcctctttaactgcgacatttgagtatatttaaactgatagctagctcagtcctagggattatgctagctaagtaggtacgtaaggaggtgataaatgaaaatactacgatggttgttcgctctggtcatgcttattgctactacagaagctatggctgccgggcatagcgttgacgtttactacggttacaacggtgattcgcgtaatattgcgacttttaatttaaaaataatgatgccatccgcagtgtacgttggtgaatataaaagtagtcaatggctcatgactggggaaatattgcaaaatgtgagctggagtggtcctcctcctgccccttcggttaagctgattggctaccatcaaaatatcaacaaagcaagttgtcctggattaccgtctgggtggaactgcgggtattatacatttgaggttattgtctctgcagagattgaatcttacttttcttgtccatggttggttattatgaatgactctgaagcctctccagggggcgtgacgtatcaggggcctgatagtcacgacacgatttgtccatccgtttctgttcaaccttatgacgtttcatggaatgagaattatgtcagtaagtcaaaactgctcaccctgcagtcgacgggcggtgtggttgagaaaacgctttcaacgtatttgatgaaagatgggaagttgtgcgacagtacgcagatgaatgaaacaggtggttactgccgctgggttgcacagatgataacttttaccgcgtcgggatgtgacaaggcggaagtctcggtcacgccaaatcgacaccctataacggacaaacagttacacgatatggtcgtgcgtgttgataccagcagtatgcagccaatcgattctacttgccggttccagtacatactgaatgagttgtag

SEQ ID NO: 139 - protein, 14 aa, Escherichia coli
METYAVFGNPIAHS

SEQ ID NO: 140 - protein, 810 aa, Escherichia coli
MSVIAQAGAKGRQLHKFGGSSLADVKCYLRVAGIMAEYSQPDDMMVVSAAGSTTNQLINWLKLSQTDRLSAHQVQQTLRRYQCDLISGLLPAEEADSLISAFVSDLERLAALLDSGINDAVYAEVVGHGEVWSARLMSAVLNQQGLPAAWLDAREFLRAERAAQPQVDEGLSYPLLQQLLVQHPGKRLVVTGFISRNNAGETVLLGRNGSDYSATQIGALAGVSRVTIWSDVAGVYSADPRKVKDACLLPLLRLDEASELARLAAPVLHARTLQPVSGSEIDLQLRCSYTPDQGSTRIERVLASGTGARIVTSHDDVCLIEFQVPASQDFKLAHKEIDQILKRAQVRPLAVGVHNDRQLLQFCYTSEVADSALKILDEAGLPGELRLRQGLALVAMVGAGVTRNPLHCHRFWQQLKGQPVEFTWQSDDGISLVAVLRTGPTESLIQGLHQSVFRAEKRIGLVLFGKGNIGSRWLELFAREQSTLSARTGFEFVLAGVVDSRRSLLSYDGLDASRALAFFNDEAVEQDEESLFLWMRAHPYDDLVVLDVTASQQLADQYLDFASHGFHVISANKLAGASDSNKYRQIHDAFEKTGRHWLYNATVGAGLPINHTVRDLIDSGDTILSISGIFSGTLSWLFLQFDGSVPFTELVDQAWQQGLTEPDPRDDLSGKDVMRKLVILAREAGYNIEPDQVRVESLVPAHCEGGSIDHFFENGDELNEQMVQRLEAAREMGLVLRYVARFDANGKARVGVEAVREDHPLASLLPCDNVFRIESRWYRDNPLVIRGPGAGRDVTAGAIQSDINRLAQLL

SEQ ID NO: 141 - protein, 810 aa, Escherichia coli
MSVIAQAGAKGRQLHKFGGSSLADVKCYLRVAGIMAEYSQPDDMMVVSAAGSTTNQLINWLKLSQTDRLSAHQVQQTLRRYQCDLISGLLPAEEADSLISAFVSDLERLAALLDSGINDAVYAEVVGHGEVWSARLMSAVLNQQGLPAAWLDAREFLRAERAAQPQVDEGLSYPLLQQLLVQHPGKRLVVTGFISRNNAGETVLLGRNGSDYSATQIGALAGVSRVTIWSDVAGVYSADPRKVKDACLLPLLRLDEASELARLAAPVLHARTLQPVSGSEIDLQLRCSYTPDQGSTRIERVLASGTGARIVTSHDDVCLIEFQVPASQDFKLAHKEIDQILKRAQVRPLAVGVHNDRQLLQFCYTSEVADSALKILDEAGLPGELRLRQGLALVAMVGAGVTRNPLHCHRFWQQLKGQPVEFTWQSDDGISLVAVLRTGPTESLIQGLHQSVFRAEKRIGLVLFGKGNIGSRWLELFAREQSTLSARTGFEFVLAGVVDSRRSLLSYHGLDASRALAFFNDEAVEQDEESLFLWMRAHPYDDLVVLDVTASQQLADQYLDFASHGFHVISANKLAGASDSNKYRQIHDAFEKTGRHWLYNATVGAGLPINHTVRDLIDSGDTILSISGIFSGTLSWLFLQFDGSVPFTELVDQAWQQGLTEPDPRDDLSGKDVMRKLVILAREAGYNIEPDQVRVESLVPAHCEGGSIDHFFENGDELNEQMVQRLEAAREMGLVLRYVARFDANGKARVGVEAVREDHPLASLLPCDNVFAIESRWYRDNPLVIRGPGAGRDVTAGAIQSDINRLAQLL

SEQ ID NO: 142 - protein, 779 aa, Escherichia coli
TGTTCAGGAATTTTTTATCCGCTTCTGGACATTTTCTCTACAGAACAATCGTTAGCCCGGAAGGTCGAATCTGTGACTCTTATTTTCACGGACGAACCAGTTTACAGCTAGCTCAGTCCTAGGTATTATGCTAGCTAAGTAGGTACGTAAGGAGGTGATAAATGAAAGCTTCACTGGCGCTGCTCAGCCTGCTAACGGCATTTACCAGCCACTCCTTAAAATCTCCCGCCGTTCCACCAACCGTGGTACAAATCCAGGCCAATACCAACCTTGCCATCGCAGACGGTGCCAGACAGCAAATTGGCAGCACGCTATTTTACGATCCGGCGTATGTGCAGCTTACTTATCCTGGCGGTGATGTTCCGCAAGAACGCGGTGTATGTTCCGATGTGGTGATCCGCGCATTGCGCAGCCAGAAGGTCGATTTGCAGAAACTGGTTCACGAAGATATGGCGAAGAATTTTGCTGAGTACCCGCAAAAATGGAAGTTAAAGCGCCCGGACAGCAACATCGATCACCGTCGGGTGCCTAATCTGGAAACCTGGTTTAGCCGCCATGATAAAACACGCCCCACCAGCAAGAACCCCAGTGACTATCAAGCGGGCGATATTGTCTCCTGGCGACTGGATAACGGGCTGGCACATATTGGGGTGGTTTCAGATGGCTTCGCCCGCGACGGTACGCCGCTGGTGATACATAACATTGGCGCAGGCGCGCAGGAAGAAGATGTGCTGTTTAACTGGCGGATGGTGGGGCATTATCGTTATTTTGTTAAATAA

SEQ ID NO: 143 - protein, 292 aa, Escherichia coli
MFTGSIVAIVTPMDEKGNVCRASLKKLIDYHVASGTSAIVSVGTTGESATLNHDEHADVVMMTLDLADGRIPVIAGTGANQTAEAISLTQRFNDSGIVGCLTVTPYYNRPSQEGLYQHFKAIAEHTDLPQILYNVPSRTGCDLLPETVGRLAKVKNIIGIKEATGNLTRVNQIKELVSDDFVLLSGDDASALDFMQLGGHGVISVTANVAARDMAQMCKLAAEGHFAEARVINQRLMPLHNKLFVEPNPIPVKWACKELGLVATDTLRLPMTPITDSGRETVRAALKHAGLL

SEQ ID NO: 144 - protein, 810 aa, Escherichia coli
MSVIAQAGAKGRQLHKFGGSSLADVKCYLRVAGIMAEYSQPDDMMVVSAAGSTTNQLINWLKLSQTDRLSAHQVQQTLRRYQCDLISGLLPAEEADSLISAFVSDLERLAALLDSGINDAVYAEVVGHGEVWSARLMSAVLNQQGLPAAWLDAREFLRAERAAQPQVDEGLSYPLLQQLLVQHPGKRLVVTGFISRNNAGETVLLGRNGSDYSATQIGALAGVSRVTIWSDVAGVYSADPRKVKDACLLPLLRLDEASELARLAAPVLHARTLDPVSGSEIDLQLRCSYTPDQGSTRIERVLASGTGARIVTSHDDVCLIEFQVPASQDFKLAHKEIDQILKRAQVRPLAVGVHNDRQLLQFCYTSEVADSALKILDEAGLPGELRLRQGLALVAMVGAGVTRNPLHCHRFWQQLKGQPVEFTWQSDDGISLVAVLRTGPTESLIQGLHQSVFRAEKRIGLVLFGKGNIGSRWLELFAREQSTLSARTGFEFVLAGVVDSRRSLLSYDGLDASRALAFFNDEAVEQDEESLFLWMRAHPYDDLVVLDVTASQQLADQYLDFASHGFHVISANKLAGASDSNKYRQIHDAFEKTGRHWLYNATVGAGLPINHTVRDLIDSGDTILSISGIFSGTLSWLFLQFDGSVPFTELVDQAWQQGLTEPDPRDDLSGKDVMRKLVILAREAGYNIEPDQVRVESLVPAHCEGGSIDHFFENGDELNEQMVQRLEAAREMGLVLRYVARFDANGKARVGVEAVREDHPLASLLPCDNVFAIESRWYRDNPLVIRGPGAGRDVTAGAIQSDINRLAQLL

SEQ ID NO: 145 - protein, 292 aa, Escherichia coli
MFTGSIVAIVTPMDEKGNVCRASLKKLIDYHVASGTSAIVSVGTTGESATLNHDEHADVVMMTLDLADGRIPVIAGTGANATAEAISDTQRFNDSGIVGCLTVTPYYNRPSQEGLYQHFKAIAEHTDLPQILYNVPSRTGCDLLPETVGRLAKVKNIIGIKEATGNLTRVNQIKELVSDDFVLLSGDDASALDFMQLGGHGVISVTANVAARDMAQMCKLAAEGHFAEARVINQRLMPLHNKLFVEPNPIPVKWACKELGLVATDTLRLPMTPITDSGRETVRAALKHAGLL

SEQ ID NO: 146 - protein, 449 aa, Escherichia coli
MSEIVVSKFGGTSVADFDAMNRSADIVLSDANVRLVVLSASAGITNLLVALAEGLEPGERFEKLDAIRNIQFAILERLRYPNVIREEIERLLENITVLAEAAALATSPALTDELVSHGELMSTLLFVEILRERDVQAQWFDVRKVMRTNDRFGRAEPDIAALAELAALQLLPRLNEGLVITQGFIGSENKGRTTTLGRGGSDYTAALLAEALHASRVDIWTDVPGIYTTDPRVVSAAKRIDEIAFAEAAEMATFGAKVLHPATLLPAVRSDIPVFVGSSKDPRAGGTLVCNKTENPPLFRALALRRNQTLLTLHSLNMLHSRGFLAEVFGILARHNISDDLITTSEVSVALTLDTTGSTSTGDTLLTQSLLMELSALCRVEVEEGLALVALIGNDLSKACGVGKEVFGVLEPFNIRMICYGASSHNLCFLVPGEDAEQVVQKLHSNLFE

SEQ ID NO: 147 - protein, 274 aa, Escherichia coli
MQFSKMHGLGNDFMVVDAVTQNVFFSPELIRRLADRHLGVGFDQLNVVEPPYDPELDFHYRIFNADGSEVAQCGNGARCFARFVRLKGLTNKRDIRVSTANGRMVLTVTDDDLVRVNMGEPNFEPSAVPFRANKAEKTYIMRAAEQTILCGVVSMGNPHCVIQVDDVDTAAVETLGPVLESHERFPERANIGFMQVVKREHIRLRVYERGAGETQACGSGACAAVAVGIQQGLLAEEVRVELPGGRLDIAWKGPGHPLYMTGPAVHVYDGFIHL

SEQ ID NO: 148 - DNA, 632 bp, Escherichia coli
gtgggtgcatgatctcccggctcgaaagggaagcagcgcacgaaatattatgctaaaatccgcccccctgcggggccatactcgaacccgaaggaagaaatttacagctagctcagtcctaggtattatgctagctaagtaggtacgtaaggaggtgataaatgaacattattgaagctaacgttgctaccccggacgctcgcgtcgccatcaccatcgcgcgtttcaacaactttatcaatgacagcctgctggaaggtgcaattgacgcactgaaacgtatcggtcaggtaaaagatgaaaacattaccgttgtttgggtgcctggtgcctatgagctgccgctggcggcgggtgcactggctaaaaccggtaaatacgacgcggtgattgcgctgggtacggttattcgtggtggcactgcccactttgaatatgtcgctggtggtgcaagcaacggcctggcgcatgttgcccaggacagcgaaattccggttgcttttggggttctgaccactgaaagcattgaacaagcgatcgaacgtgctggcaccaaagctggcaacaaaggtgcagaagctgcactgaccgcgcttgaaatgattaatgtattgaaagccatcaaggcctga

SEQ ID NO: 149 - protein, 449 aa, Escherichia coli
MSEIVVSKFGGTSVADFDAMNRSADIVLSDANVRLVVLSASAGITNLLVALAEGLEPGERFEKLDAIRNIQFAILERLRYPNVIREEIERLLENITVLAEAAALATSPALTDELVSHGELMSTLLFVEILRERDVQAQWFDVRKVMRTNDRFGRAEPDIAALAELAALQLLPRLNEGLVITQGFIGSENKGRTTTLGRGGSDYTAALLAEALHASRVDIWTDVPGIYTTDPRVVSAAKRIDEIAFAEAAEMATFGAKVLHPATLLPAVRSDIPVFVGSSKDPRAGGTLVCNKTENPPLFRALALRRNQTLLTLHSLNMLHSRGFLAEVFGILARHNIKVDLITTSEVSVALTLDTTGSTSTGDTLLTQSLLMELSALCRVEVEEGLALVALIGNDLSKACGVGKEVFGVLEPFNIRMICYGASSHNLCFLVPGEDAEQVVQKLHSNLFE

SEQ ID NO: 150 - protein, 4 aa, Escherichia coli
MKNK

SEQ ID NO: 151 - DNA, 3275 bp, Escherichia coli
cattaactcctttttttctccacgattggctcgtaccttgccgctacagtgaagcaagtcaagcctacaacgatacgcagaaacacgaggtcctcttttatttacggctagctcagtcctaggtatagtgctagctaagtaggtacgtaaggaggtgataaatggcgaatttctttattgatcgccccatttttgcctgggtgctggcaatcctgttgtgtctgacaggtaccctggcgattttttcattgcccgttgaacaataccccgatctcgcgccaccgaatgtgcgagtgaccgctaactatcccggcgcatcggcccagacgctggaaaacaccgtgacccaggttatcgagcaaaatatgaccggcctcgataatctcatgtatatgtcatctcagagcagtggcaccggtcaggcatctgtcactttaagttttaaagcaggcaccgatccggacgaagccgtgcagcaagtacaaaaccagctgcaatcagccatgcgaaagttaccgcaggcggtgcaaaatcagggcgtgacggtgcgtaaaaccggcgataccaacattctgaccattgccttcgtctctaccgatggttcgatggataaacaggatattgctgattatgttgccagtaatattcaggacccgttaagccgcgtgaatggcgtcggggatatcgatgcctatggttcgcaatattccatgcgtatctggctggacccggcgaaactcaacagtttccagatgacggctaaagatgtcactgatgccattgagtcacagaacgcgcagattgcggttgggcaacttggtggtacaccttccgtcgataagcaggcgctcaacgccaccattaacgcccagtcactgctgcaaacaccagaacagttccgcgatatcaccttgcgggtcaatcaggacggctcagaggtaaggctgggcgatgtcgccaccgtcgaaatgggggcggagaaatacgattatcttagccgcttcaatggtaagccagcctccgggctgggggtaaaactggcctccggcgctaacgaaatggcgacagcggagctggtgctcaatcgtctcgacgagctggcgcagtatttcccgcatggactggaatacaaggtggcgtatgaaaccacctcgtttgttaaagcctccattgaagacgtggtgaaaacgctgctggaagctatcgctctggttttcctcgttatgtatctgttcctgcaaaacttccgcgccacgctgatacccactatcgccgtgccggtggtgttgatgggaaccttctccgtactttacgccttcggttacagcgtcaacaccttaaccatgttcgcgatggtgctggcgatcggtctgctggtggatgacgccatcgtggtggtggaaaacgtcgaacgtattatgagtgaggaaggactcactcctcgcgaagccacacgtaaatcgatggggcagatccagggggcactggtcgggattgcgatggttctttcggcggtatttgtaccaatggccttcttcggcggcaccaccggtgccatctatcgccagttctctattaccattgttgcggcgatggtgctgtcagtactggtagcgatgatcctcactccggctctgtgtgccacactacttaagccactgaaaaaaggtgagcatcatgggcaaaaaggcttttttgcctggtttaaccagatgtttaaccgcaacgccgaacgctacgaaaaaggggtggcgaaaattctccaccgtagcctgcgctggattgtgatttatgtcctgctgcttggcggcatggtgttcctgttcctgcgtttgccgacgtcgttcttaccgctggaagaccgtggcatgtttactacctcggtacagttgcccagcggttcaacgcaacaacagaccctgaaagtcgttgagcaaatcgagaaatactacttcacccatgaaaaagacaacatcatgtcggtgtttgccaccgttggttctggccctgggggtaacgggcaaaacgtggcgcgaatgtttatccgcctgaaagactggagcgaacgcgacagtaagaccggcacctcgtttgccattatcgagcgtgcaacgaaggcgtttaaccaaattaaagaagctcgcgttatcgccagcagcccgccagcaattagcggtcttggtagttctgcaggttttgatatggagttgcaggaccacgctggagcgggtcacgatgcgctgatggcagcacgtaatcagttgctggcgctggcggcggaaaacccggagctaacccgtgtgcgccataacggcctcgacgacagtccgcagttgcagattgatatcgaccagcgtaaagctcaggcgctgggcgttgctatcgacgatattaacgacacactgcaaaccgcctggggttcgagctatgtgaatgactttatggatcgcggtcgcgtgaagaaagtctatgtgcaggcagctgcgccgtatcgcatgctgccagatgacatcaatctctggtatgtccgaaataaagatggcggcatggtgcccttctctgctttcgcgacctcacgctgggaaacaggctcgccgcgtctggaacgctataacggttattctgcggttgagattgttggggaagccgcaccgggggtcagtaccggtacggcgatggatattatggaatcgttagtgaagcagctgccaaacggctttggtctggagtggacggcgatgtcgtatcaggagcggctttccggcgcgcaggctccggcgctgtacgccatttccttgctggtggtattcctgtgtctggctgcgttgtatgaaagctggtcggtgccgttctcggtaatgctggtcgtgccgctgggggtaatcggcgcgctgctggcaacctggatgcgcgggctggaaaacgacgtttacttccaggtgggcctgttaacggtcattggtttatcggcgaaaaacgccatcctgatcgtcgagtttgctaacgagatgaaccaaaaaggccacgacctgtttgaagcgacgctccacgcctgccgtcagcgtttacgcccgattctgatgacctcgctggcatttatcttcggcgtattgccaatggcaaccagcacgggtgccggttccggtggtcagcatgcggtgggtactggcgtaatgggcgggatgatttcggccactattctggctatttacttcgtgccgctgttctttgtgctggtgcgccgccgcttcccgctgaagccgcgcccggaataa

SEQ ID NO: 152 - protein, 292 aa, Escherichia coli
MFTGSIVAIVTPMDEKGNVCRASLKKLIDYHVASGTSAIVSVGTTGESATLNHDEHADVVMMTLDLADGRIPVIAGTGANATAEAISFTQRFNDSGIVGCLTVTPYYNRPSQEGLYQHFKAIAEHTDLPQILYNVPSRTGCDLLPETVGRLAKVKNIIGIKEATGNLTRVNQIKELVSDDFVLLSGDDASALDFMQLGGHGVISVTANVAARDMAQMCKLAAEGHFAEARVINQRLMPLHNKLFVEPNPIPVKWACKELGLVATDTLRLPMTPITDSGRETVRAALKHAGLL

SEQ ID NO: 153 - protein, 292 aa, Escherichia coli
MFTGSIVAIVTPMDEKGNVCRASLKKLIDYHVASGTSAIVSVGTTGESATLNHDEHADVVMMTLDLADGRIPVIAGTGANATAEAISLTQRFNDSGIVGCLTVTPHYNRPSQEGLYQHFKAIAEHTDLPQILYNVPSRTGCDLLPETVGRLAKVKNIIGIKEATGNLTRVNQIKELVSDDFVLLSGDDASALDFMQLGGHGVISVTANVAARDMAQMCKLAAEGHFAEARVINQRLMPLHNKLFVEPNPIPVKWACKELGLVATDTLRLPMTPITDSGRETVRAALKHAGLL

SEQ ID NO: 154 - protein, 4 aa, Escherichia coli
MAGP

SEQ ID NO: 155 - protein, 4 aa, Escherichia coli
MGST

SEQ ID NO: 156 - protein, 292 aa, Escherichia coli
MFTGSIVAIVTPMDEKGNVCRASLKKLIDYHVASGTSAIVSVGTTGESATLNHDEHADVVMMTLDLADGRIPVIAGTGAAATAEAISLTQRFNDSGIVGCLTVTPYYNRPSQEGLYQHFKAIAEHTDLPQILYNVPSRTGCDLLPETVGRLAKVKNIIGIKEATGNLTRVNQIKELVSDDFVLLSGDDASALDFMQLGGHGVISVTANVAARDMAQMCKLAAEGHFAEARVINQRLMPLHNKLFVEPNPIPVKWACKELGLVATDTLRLPMTPITDSGRETVRAALKHAGLL

SEQ ID NO: 157 - protein, 4 aa, Escherichia coli
MNKT

SEQ ID NO: 158 - protein, 14 aa, Escherichia coli
MNNNEPDTLPDPAI

SEQ ID NO: 159 - protein, 4 aa, Escherichia coli
MRTG

SEQ ID NO: 160 - protein, 14 aa, Escherichia coli
MNNDNTDYVSNESG

SEQ ID NO: 161 - protein, 14 aa, Escherichia coli
MSTQEATLQQPLLQ

SEQ ID NO: 162 - protein, 292 aa, Escherichia coli
MFTGSIVAIVTPMDEKGNVCRASLKKLIDYHVASGTSAIVSVGTTGESATLNHDEHADVVMMTLDLADGRIPVIAGTGANVTAEAISLTQRFNDSGIVGCLTVTPYYNRPSQEGLYQHFKAIAEHTDLPQILYNVPSRTGCDLLPETVGRLAKVKNIIGIKEATGNLTRVNQIKELVSDDFVLLSGDDASALDFMQLGGHGVISVTANVAARDMAQMCKLAAEGHFAEARVINQRLMPLHNKLFVEPNPIPVKWACKELGLVATDTLRLPMTPITDSGRETVRAALKHAGLL

SEQ ID NO: 163 - protein, 292 aa, Escherichia coli
MFTGSIVAIVTPMDEKGNVCRASLKKLIDYHVASGTSAIVSVGTTGESATLNHDEHMDVVMMTLDLADGRIPVIAGTGANATAEAISLTQRFNDSGIVGCLTVTPYYNRPSQEGLYQHFKAIAEHTDLPQILYNVPSRTGCDLLPETVGRLAKVKNIIGIKEATGNLTRVNQIKELVSDDFVLLSGDDASALDFMQLGGHGVISVTANVAARDMAQMCKLAAEGHFAEARVINQRLMPLHNKLFVEPNPIPVKWACKELGLVATDTLRLPMTPITDSGRETVRAALKHAGLL

SEQ ID NO: 164 - protein, 4 aa, Escherichia coli
MPPP

SEQ ID NO: 165 - protein, 540 aa, Escherichia coli
MRVNNGLTPQELEAYGISDVHDIVYNPSYDLLYQEELDPSLTGYERGVLTNLGAVAVDTGIFTGRSPKDKYIVRDDTTRDTFWWADKGKGKNDNKPLSPETWQHLIGLVTRQLSGKRLFVVDAFCGANPDTRLSVRFITEVAWQAHFVKNMFIRPSDEELAGFKPDFIVMNGAKCTNPQWKEQGLNSENFVAFNLTERMQLIGGTWYGGEMKKGMFSMMNYLLPLKGIASMHCSANVGEKGDVAVFFGLSGTGKTTLSTDPKRRLIGDDEHGWDDDGVFNFEGGCYAKTIKLSKEAEPEIYNAIRRDALLENVTVREDGTIDFDDGSKTENTRVSYPIYHIDNIVKPVSKAGHATKVIFLTADAFGVLPPVSRLTADQTQYHFLSGFTAKLAGTERGITEPTPTFSACFGAAFLSLHPTQYAEVLVKRMQAAGAQAYLVNTGWNGTGKRISIKDTRAIIDAILNGSLDNAETFTLPMFNLAIPTELPGVDTKILDPRNTYASPEQWQEKAETLAKLFIDNFDKYTDTPAGAALVAAGPKL

SEQ ID NO: 166 - protein, 810 aa, Escherichia coli
MSVIAQAGAKGRQLHKFGGSSLADVKCYLRVAGIMAEYSQPDDMMVVSAAGSTTNQLINWLKLSQTDRLSAHQVQQTLRRYQCDLISGLLPAEEADSLISAFVSDLERLAALLDSGINDAVYAEVVGHGEVWSARLMSAVLNQQGLPAAWLDAREFLRAERAAQPQVDEGLSYPLLQQLLVQHPGKRLVVTGFISRNNAGETVLLGRNGSDYSATQIGALAGVSRVTIWSDVAGVYSADPRKVKDACLLPLLRLDEASELARLAAPVLHARTLQPVSGSEIDLQLRCSYTPDQGSTRIERVLASGTGARIVTSHDDVCLIEFQVPASQDFKLAHKEIDQILKRAQVRPLAVGVHNDRQLLQFCYTSEVADSALKILDEAGLPGELRLRQGLALVAMVGAGVTRNPLHCHRFWQQLKGQPVEFTWQSDDGISLVAVLRTGPTESLIQGLHQSVFRAEKRIGLVLFGKGNIGSRWLELFAREQSTLSARTGFEFVLAGVVDSRRSLLSYDGLDASRALAFFNDEAVEQDEESLFLWMRAHPYDDLVVLDVTASQQLADQYLDFASHGFHVISANKLAGASDSNKYRQIHDAFEKTGRHWLYNATVGAGLPINHTVRDLIDSGDTILSISGIFSGTLSWLFLQFDGSVPFTELVDQAWQQGLTEPDPRDDLSGKDVMRKLVILAREAGYNIEPDQVRVESLVPAHCEGGSIDHFFENGDELNEQMVQRLEAAREMGLVLRYVARFDANGKARVGVEAVREDHPLASLLFCDNVFAIESRWYRDNPLVIRGPGAGRDVTAGAIQSDINRLAQLL

SEQ ID NO: 167 - protein, 820 aa, Escherichia coli
MRVLKFGGTSVANAERFLRVADILESNARQGQVATVLSAPAKITNHLVAMIEKTISGQDALPNISDAERIFAELLTGLAAAQPGFPLAQLKTFVDQEFAQIKHVLHGISLLGQCPDSINAALICRGEKMSIAIMAGVLEARGHNVTVIDPVEKLLAVGHYLESTVDIAESTRRIAASRIPADHMVLMAGFTAGNEKGELVVLGRNGSDYSAAVLAACLRADCCEIWTDVDGVYTCDPRQVPDARLLKSMSYQEAMELSYFGAKVLHPRTITPIAQFQIPCLIKNTGNPQAPGTLIGASRDEDELPVKGISNLNNMAMFSVSGPGMKGMVGMAARVFAAMSRARISVVLITQSSSEYSISFCVPQSDCVRAERAMQEEFYLELKEGLLEPLAVTERLAIISVVGDGMRTLRGISAKFFAALARANINIVAIAQGSSERSISVVVNNDDATTGVRVTHQMLFNTDQVIEVFVIGVGGVGGALLEQLKRQQSWLKNKHIDLRVCPVANSKALLTNVHGLNLENWQEELAQAKEPFNLGRLIRLVKEYHLLNPVIVDCTSSQAVADQYADFLREGFHVVTPNKKANTSSMDYYHQLRYAAEKSRRKFLYDTNVGAGLPVIENLQNLLNAGDELMKFSGILSGSLSYIFGKLDEGMSFSEATTLAREMGYTEPDPRDDLSGMDVARKLLILARETGRELELADIEIEPVLPAEFNAEGDVAAFMANLSQLDDLFAARVAKARDEGKVLRYVGNIDEDGVCRVKIAEVDGNDPLFKVKNGENALAFYSHYYQPLPLVLRGYGAGNDVTAAGVFADLLRTLSWKLGV

SEQ ID NO: 168 - protein, 820 aa, Escherichia coli
MRVLKFGGTSVANAERFLRVADILESNARQGQVATVLSAPAKITNHLVAMIEKTISGQDALPNISDAERIFAELLTGLAAAQPGFPLAQLKTFVDQEFAQIKHVLHGISLLGQCPDSINAALICRGEKMSIAIMAGVLEARGHNVTVIDPVEKLLAVGHYLESTVDIAESTRRIAASRIPADHMVLMAGFTAGNEKGELVVLGRNGSDYSAAVLAACLRADCCEIWTDVDGVYTCDPRQVPDARLLKSMSYQEAMELSYFGAKVLHPRTITPIAQFQIPCLIKNTGNPQAPGTLIGASRDEDELPVKGISNLNNMAMFSVSGPGMKGMVGMAARVFAAMSRARISVVLITQSSSEYSISFCVPQSDCVRAERAMQEEFYLELKEGLLEPLAVTERLAIISVVGDGMRTLRGISAKFFAALARANINIVAIAQGSSERSISVVVNNDDATTGVRVTHQMLFNTDQVIEVFVIGVGGVGGALLEQLKRQQSWLKNKHIDLRVCGVANSKALLTNVHGLNLENWQEELAQAKEPFNLGRLIRLVKEYHLLNPVIVDCTSSQAVADQYADFLREGFHVVTPNKKANTSSMDYYHQLRYAAEKSRRKFLYDTNVGAGLPVIENLQNLLNAGDELMKFSGILSGSLSYIFGKLDEGMSFSEATTLAREMGYTEPDPRDDLSGMDVARGLLILARETGRELELADIEIEPVLPAEFNAEGDVAAFMANLSQLDDLFAARVAKARDEGKVLRYVGNIDEDGVCRVKIAEVDGNDPLFKVKNGENALAFYSHYYQPLPLVLRGYGAGNDVTAAGVFADLLRTLSWKLGV

SEQ ID NO: 169 - protein, 820 aa, Escherichia coli
MRVLKFGGTSVANAERFLRVADILESNARQGQVATVLSAPAKITNHLVAMIEKTISGQDALPNISDAERIFAELLTGLAAAQPGFPLAQLKTFVDQEFAQIKHVLHGISLLGQCPDSINAALICRGEKMSIAIMAGVLEARGHNVTVIDPVEKLLAVGHYLESTVDIAESTRRIAASRIPADHMVLMAGFTAGNEKGELVVLGRNGSDYSAAVLAACLRADCCEIWTDVDGVYTCDPRQVPDARLLKSMSYQEAMELSYFGAKVLHPRTITPIAQFQIPCLIKNTGNPQAPGTLIGASRDEDELPVKGISNLNNMAMFSVSGPGMKGMVGMAARVFAAMSRARISVVLITQSSSEYSISFCVPQSDCVRAERAMQEEFYLELKEGLLEPLAVTERLAIISVVGDGMRTLRGISAKFFAALARANINIVAIAQGSSERSISVVVNNDDATTGVRVTHQMLFNTDQVIEVFVIGVGGVGGALLEQLKRQQSWLKNKHIDLRVCGVANSKALLTNVHGLNLENWQEELAQAKEPFNLGRLIRLVKEYHLLNPVIVDCTSSQAVADQYADFLREGFHVVTPNKKANTSSMDYYHQLRYAAEKSRRKFLYDTNVGAGLPVIENLQNLLNAGDELMKFSIILSGSLSYIFGKLDEGMSFSEATTLAREMGYTEPDPRDDLSGMDVARKLLILARETGRELELADIEIEPVLPAEFNAEGDVAAFMANLSQLDDLFAARVAKARDEGKVLRYVGNIDEDGVCRVKIAEVDGNDPLFKVKNGENALAFYSHYYQPLPLVLRGYGAGNDVTAAGVFADLLRTLSWKLGV

SEQ ID NO: 170 - protein, 820 aa, Escherichia coli
MRVLKFGGTSVANAERFLRVADILESNARQGQVATVLSAPAKITNHLVAMIEKTISGQDALPNISDAERIFAELLTGLAAAQPGFPLAQLKTFVDQEFAQIKHVLHGISLLGQCPDSINAALICRGEKMSIAIMAGVLEARGHNVTVIDPVEKLLAVGHYLESTVDIAESTRRIAASRIPADHMVLMAGFTAGNEKGELVVLGRNGSDYSAAVLAACLRADCCEIWTDVDGVYTCDPRQVPDARLLKSMSYQEAMELSYFGAKVLHPRTITPIAQFQIPCLIKNTGNPQAPGTLIGASRDEDELPVKGISNLNNMAMFSVSGPGMKGMVGMAARVFAAMSRARISVVLITQSSSEYSISFCVPQSDCVRAERAMQEEFYLELKEGLLEPLAVTERLAIISVVGDGMRTLRGISAKFFAALARANINIVAIAQGSSERSISVVVNNDDATTGVRVTHQMLFNTDQVIEVFVIGVGGVGGALLEQLKRDQSWLKNKHIDLRVCGVANSKALLTNVHGLNLENWQEELAQAKEPFNLGRLIRLVKEYHLLNPVIVDCTSSQAVADQYADFLREGFHVVTPNKKANTSSMDYYHQLRYAAEKSRRKFLYDTNVGAGLPVIENLQNLLNAGDELMKFSGILSGSLSYIFGKLDEGMSFSEATTLAREMGYTEPDPRDDLSGMDVARKLLILARETGRELELADIEIEPVLPAEFNAEGDVAAFMANLSQLDDLFAARVAKARDEGKVLRYVGNIDEDGVCRVKIAEVDGNDPLFKVKNGENALAFYSHYYQPLPLVLRGYGAGNDVTAAGVFADLLRTLSWKLGV

SEQ ID NO: 171 - protein, 820 aa, Escherichia coli
MRVLKFGGTSVANAERFLRVADILESNARQGQVATVLSAPAKITNHLVAMIEKTISGQDALPNISDAERIFAELLTGLAAAQPGFPLAQLKTFVDQEFAQIKHVLHGISLLGQCPDSINAALICRGEKMSIAIMAGVLEARGHNVTVIDPVEKLLAVGHYLESTVDIAESTRRIAASRIPADHMVLMAGFTAGNEKGELVVLGRNGSDYSAAVLAACLRADCCEIWTDVDGVYTCDPRQVPDARLLKSMSYQEAMELSYFGAKVLHPRTITPIAQFQIPCLIKNTGNPQAPGTLIGASRDEDELPVKGISNLNNMAMFSVSGPGMKGMVGMAARVFAAMSRARISVVLITQSSSEYSISFCVPQSDCVRAERAMQEEFYLELKEGLLEPLAVTERLAIISVVGDGMRTLRGISAKFFAALARANINIVAIAQGSSERSISVVVNNDDATTGVRVTHQMLFNTDQVIEVFVIGVGGVGGALLEQLKRQQSWLKNKHIDLRVCGVANSKALLTNVHGLNLENWQEELAQAKEPFNLGRLIRLVKEYHLLNPVIVDCTSSQAVADQYADFLREGFHVVTPNKKANTSSMDYYHQLRYAAEKSRRKFLYDTNVGAGLPVIENLQNLLNAGDELMKFSGILSGSLSYIFGKLDEGMSFSEATTLAREMGYTEPDPRDDLSGMDVARKLLILARETGRELELADIEIEPVLPAEFNAEGDVAAFMANLSQLDDLFAARVAKARDEGKVLRYVGNIDEDGVCRVKIAEVDGNDPLFKVKNGENALAFYSHYYQPLPLVLRGYGAGNDVTAAGVFLDLLRTLSWKLGV

SEQ ID NO: 172 - protein, 820 aa, Escherichia coli
MRVLKFGGTSVANAERFLRVADILESNARQGQVATVLSAPAKITNHLVAMIEKTISGQDALPNISDAERIFAELLTGLAAAQPGFPLAQLKTFVDQEFAQIKHVLHGISLLGQCPDSINAALICRGEKMSIAIMAGVLEARGHNVTVIDPVEKLLAVGHYLESTVDIAESTRRIAASRIPADHMVLMAGFTAGNEKGELVVLGRNGSDYSAAVLAACLRADCCEIWTDVDGVYTCDPRQVPDARLLKSMSYQEAMELSYFGAKVLHPRTITPIAQFQIPCLIKNTGNPQAPGTLIGASRDEDELPVKGISNLNNMAMFSVSGPGMKGMVGMAARVFAAMSRARISVVLITQSSSEYSISFCVPQSDCVRAERAMQEEFYLELKEGLLEPLAVTERLAIISVVGDGMRTLRGISAKFFAALARANINIVAIAQGSSERSISVVVNNDDATTGVRVTHQMLFNTDQVIEVFVIGVGGVGGALLEQLKRQQSWLKNKHIDLRVCGVANSKALLTNVHGLNLENWQEELAQAKEPFNLGRLIRLVKEYHLLNPVIVDCTSSQAVADQYADFLREGFHVVTPNKKANTSSMDYYHQLRYAAEKSRRKFLYDTNNGAGLPVIENLQNLLNAGDELMKFSGILSGSLSYIFGKLDEGMSFSEATTLAREMGYTEPDPRDDLSGMDVARKLLILARETGRELELADIEIEPVLPAEFNAEGDVAAFMANLSQLDDLFAARVAKARDEGKVLRYVGNIDEDGVCRVKIAEVDGNDPLFKVKNGENALAFYSHYYQPLPLVLRGYGAGNDVTAAGVFADLLRTLSWKLGV

SEQ ID NO: 173 - protein, 820 aa, Escherichia coli
MRVLKFGGTSVANAERFLRVADILESNARQGQVATVLSAPAKITNHLVAMIEKTISGQDALPNISDAERIFAELLTGLAAAQPGFPLAQLKTFVDQEFAQIKHVLHGISLLGQCPDSINAALICRGEKMSIAIMAGVLEARGHNVTVIDPVEKLLAVGHYLESTVDIAESTRRIAASRIPADHMVLMAGFTAGNEKGELVVLGRNGSDYSAAVLAACLRADCCEIWTDVDGVYTCDPRQVPDARLLKSMSYQEAMELSYFGAKVLHPRTITPIAQFQIPCLIKNTGNPQAPGTLIGASRDEDELPVKGISNLNNMAMFSVSGPGMKGMVGMAARVFAAMSRARISVVLITQSSSEYSISFCVPQSDCVRAERAMQEEFYLELKEGLLEPLAVTERLAIISVVGDGMRTLRGISAKFFAALARANINIVAIAQGSSERSISVVVNNDDATTGVRVTHQMLFNTDQVIEVFVIGVGGVEGALLEQLKRQQSWLKNKHIDLRVCGVANSKALLTNVHGLNLENWQEELAQAKEPFNLGRLIRLVKEYHLLNPVIVDCTSSQAVADQYADFLREGFHVVTPNKKANTSSMDYYHQLRYAAEKSRRKFLYDTNVGAGLPVIENLQNLLNAGDELMKFSGILSGSLSYIFGKLDEGMSFSEATTLAREMGYTEPDPRDDLSGMDVARKLLILARETGRELELADIEIEPVLPAEFNAEGDVAAFMANLSQLDDLFAARVAKARDEGKVLRYVGNIDEDGVCRVKIAEVDGNDPLFKVKNGENALAFYSHYYQPLPLVLRGYGAGNDVTAAGVFADLLRTLSWKLGV

SEQ ID NO: 174 - protein, 820 aa, Escherichia coli
MRVLKFGGTSVANAERFLRVADILESNARQGQVATVLSAPAKITNHLVAMIEKTISGQDALPNISDAERIFAELLTGLAAAQPGFPLAQLKTFVDQEFAQIKHVLHGISLLGQCPDSINAALICRGEKMSIAIMAGVLEARGHNVTVIDPVEKLLAVGHYLESTVDIAESTRRIAASRIPADHMVLMAGFTAGNEKGELVVLGRNGSDYSAAVLAACLRADCCEIWTDVDGVYTCDPRQVPDARLLKSMSYQEAMELSYFGAKVLHPRTITPIAQFQIPCLIKNTGNPQAPGTLIGASRDEDELPVKGISNLNNMAMFSVSGPGMKGMVGMAARVFAAMSRARISVVLITQSSSEYSISFCVPQSDCVRAERAMQEEFYLELKEGLLEPLAVTERLAIISVVGDGMRTLRGISAKFFAALARANINIVAIAQGSSERSISVVVNNDDATTGVRVTHQMLFNTDQVIEVFVIGVGGVGGALLEQLKRQQSWLKNKHIDLRVCGVANSKALLTNVHGLNLENWQEELAQAKEPFNLGRLIRLVKEYHLLNPVIVDCTSSQAVADQYADFLREGFHVVTPNKKANTSSMDYYHQLRYAAEKSRRKKLYDTNVGAGLPVIENLQNLLNAGDELMKFSGILSGSLSYIFGKLDEGMSFSEATTLAREMGYTEPDPRDDLSGMDVARKLLILARETGRELELADIEIEPVLPAEFNAEGDVAAFMANLSQLDDLFAARVAKARDEGKVLRYVGNIDEDGVCRVKIAEVDGNDPLFKVKNGENALAFYSHYYQPLPLVLRGYGAGNDVTAAGVFADLLRTLSWKLGV

SEQ ID NO: 175 - protein, 820 aa, Escherichia coli
MRVLKFGGTSVANAERFLRVADILESNARQGQVATVLSAPAKITNHLVAMIEKTISGQDALPNISDAERIFAELLTGLAAAQPGFPLAQLKTFVDQEFAQIKHVLHGISLLGQCPDSINAALICRGEKMSIAIMAGVLEARGHNVTVIDPVEKLLAVGHYLESTVDIAESTRRIAASRIPADHMVLMAGFTAGNEKGELVVLGRNGSDYSAAVLAACLRADCCEIWTDVDGVYTCDPRQVPDARLLKSMSYQEAMELSYFGAKVLHPRTITPIAQFQIPCLIKNTGNPQAPGTLIGASRDEDELPVKGISNLNNMAMFSVSGPGMKGMVGMAARVFAAMSRARISVVLITQSSSEYSISFCVPQSDCVRAERAMQEEFYLELKEGLLEPLAVTERLAIISVVGDGMRTLRGISAKFFAALARANINIVAIAQGSSERSISVVVNNDDATTGVRVTHQMLFNTDQVIEVFVIGVGGVGGARLEQLKRQQSWLKNKHIDLRVCGVANSKALLTNVHGLNLENWQEELAQAKEPFNLGRLIRLVKEYHLLNPVIVDCTSSQAVADQYADFLREGFHVVTPNKKANTSSMDYYHQLRYAAEKSRRKFLYDTNVGAGLPVIENLQNLLNAGDELMKFSGILSGSLSYIFGKLDEGMSFSEATTLAREMGYTEPDPRDDLSGMDVARKLLILARETGRELELADIEIEPVLPAEFNAEGDVAAFMANLSQLDDLFAARVAKARDEGKVLRYVGNIDEDGVCRVKIAEVDGNDPLFKVKNGENALAFYSHYYQPLPLVLRGYGAGNDVTAAGVFADLLRTLSWKLGV

SEQ ID NO: 176 - protein, 820 aa, Escherichia coli
MRVLKFGGTSVANAERFLRVADILESNARQGQVATVLSAPAKITNHLVAMIEKTISGQDALPNISDAERIFAELLTGLAAAQPGFPLAQLKTFVDQEFAQIKHVLHGISLLGQCPDSINAALICRGEKMSIAIMAGVLEARGHNVTVIDPVEKLLAVGHYLESTVDIAESTRRIAASRIPADHMVLMAGFTAGNEKGELVVLGRNGSDYSAAVLAACLRADCCEIWTDVDGVYTCDPRQVPDARLLKSMSYQEAMELSYFGAKVLHPRTITPIAQFQIPCLIKNTGNPQAPGTLIGASRDEDELPVKGISNLNNMAMFSVSGPGMKGMVGMAARVFAAMSRARISVVLITQSSSEYSISFCVPQSDCVRAERAMQEEFYLELKEGLLEPLAVTERLAIISVVGDGMRTLRGISAKFFAALARANINIVAIAQGSSERSISVVVNNDDATTGVRVTHQMLFNTDQVIEVFVIGVLGVGGALLEQLKRQQSWLKNKHIDLRVCGVANSKALLTNVHGLNLENWQEELAQAKEPFNLGRLIRLVKEYHLLNPVIVDCTSSQAVADQYADFLREGFHVVTPNKKANTSSMDYYHQLRYAAEKSRRKFLYDTNVGAGLPVIENLQNLLNAGDELMKFSGILSGSLSYIFGKLDEGMSFSEATTLAREMGYTEPDPRDDLSGMDVARKLLILARETGRELELADIEIEPVLPAEFNAEGDVAAFMANLSQLDDLFAARVAKARDEGKVLRYVGNIDEDGVCRVKIAEVDGNDPLFKVKNGENALAFYSHYYQPLPLVLRGYGAGNDVTAAGVFADLLRTLSWKLGV

SEQ ID NO: 177 - protein, 820 aa, Escherichia coli
MRVLKFGGTSVANAERFLRVADILESNARQGQVATVLSAPAKITNHLVAMIEKTISGQDALPNISDAERIFAELLTGLAAAQPGFPLAQLKTFVDQEFAQIKHVLHGISLLGQCPDSINAALICRGEKMSIAIMAGVLEARGHNVTVIDPVEKLLAVGHYLESTVDIAESTRRIAASRIPADHMVLMAGFTAGNEKGELVVLGRNGSDYSAAVLAACLRADCCEIWTDVDGVYTCDPRQVPDARLLKSMSYQEAMELSYFGAKVLHPRTITPIAQFQIPCLIKNTGNPQAPGTLIGASRDEDELPVKGISNLNNMAMFSVSGPGMKGMVGMAARVFAAMSRARISVVLITQSSSEYSISFCVPQSDCVRAERAMQEEFYLELKEGLLEPLAVTERLAIISVVGDGMRTLRGISAKFFAALARANINIVAIAQGSSERSISVVVNNDDATTGVRVTHQMLFNTDQVIEVFVIGVGGVGGALLEQLKRQQSWLKNKHIDLRVCGVANSKALLTNVHGLNLENWQEELAQAKEPFNLGRLIRLVKEYHLLNPVIVDCTSSQAVADQYADFLREGFHVVTPNKKANTSSMDYYHQLRYAAEKSRRKFLYDTNVGAGLPVIENLQNLLNAGDELMKFSGILSGSLSYIFGKLDEGMSFSEATTLAREMGYTEPDPRDDLSGMDVARKLLWLARETGRELELADIEIEPVLPAEFNAEGDVAAFMANLSQLDDLFAARVAKARDEGKVLRYVGNIDEDGVCRVKIAEVDGNDPLFKVKNGENALAFYSHYYQPLPLVLRGYGAGNDVTAAGVFADLLRTLSWKLGV

SEQ ID NO: 178 - protein, 820 aa, Escherichia coli; identical to SEQ ID NO: 177

SEQ ID NO: 179 - protein, 820 aa, Escherichia coli
MRVLKFGGTSVANAERFLRVADILESNARQGQVATVLSAPAKITNHLVAMIEKTISGQDALPNISDAERIFAELLTGLAAAQPGFPLAQLKTFVDQEFAQIKHVLHGISLLGQCPDSINAALICRGEKMSIAIMAGVLEARGHNVTVIDPVEKLLAVGHYLESTVDIAESTRRIAASRIPADHMVLMAGFTAGNEKGELVVLGRNGSDYSAAVLAACLRADCCEIWTDVDGVYTCDPRQVPDARLLKSMSYQEAMELSYFGAKVLHPRTITPIAQFQIPCLIKNTGNPQAPGTLIGASRDEDELPVKGISNLNNMAMFSVSGPGMKGMVGMAARVFAAMSRARISVVLITQSSSEYSISFCVPQSDCVRAERAMQEEFYLELKEGLLEPLAVTERLAIISVVGDGMRTLRGISAKFFAALARANINIVAIAQGSSERSISVVVNNDDATTGVRVTHQMLFNTDQVIEVFVIGVGGVGGALLEQLKRQQSWLKNKHIDLRVCGVANSKALLTNVHGLNLENWQEELAQAKEPFNLGRLIRLVKEYHLLNPVIVDCTSSQAVADQYADFLREGFHVVTPNKKANTSSMDYYHQLRYAAEKSRRKFLYDTNVGAGLPVIENLQNLLNAEDELMKFSGILSGSLSYIFGKLDEGMSFSEATTLAREMGYTEPDPRDDLSGMDVARKLLILARETGRELELADIEIEPVLPAEFNAEGDVAAFMANLSQLDDLFAARVAKARDEGKVLRYVGNIDEDGVCRVKIAEVDGNDPLFKVKNGENALAFYSHYYQPLPLVLRGYGAGNDVTAAGVFADLLRTLSWKLGV

SEQ ID NO: 180 - protein, 819 aa, Escherichia coli
MRVLKFGGTSVANAERFLRVADILESNARQGQVATVLSAPAKITNHLVAMIEKTISGQDALPNISDAERIFAELLTGLAAAQPGFPLAQLKTFVDQEFAQIKHVLHGISLLGQCPDSINAALICRGEKMSIAIMAGVLEARGHNVTVIDPVEKLLAVGHYLESTVDIAESTRRIAASRIPADHMVLMAGFTAGNEKGELVVLGRNGSDYSAAVLAACLRADCCEIWTDVDGVYTCDPRQVPDARLLKSMSYQEAMELSYFGAKVLHPRTITPIAQFQIPCLIKNTGNPQAPGTLIGASRDEDELPVKGISNLNNMAMFSVSGPGMKGMVGMAARVFAAMSRARISVVLITQSSSEYSISFCVPQSDCVRAERAMQEEFYLELKEGLLEPLAVTERLAIISVVGDGMRTLRGISAKFFAALARANINIVAIAQGSSERSISVVVNNDDATTGVRVTHQMLFNTDQVIEVFVIGVGGVGGALLEQLKRQQSWLKNKHIDLRVCGVANSKALLTNVHGLNLENWQEELAQAKEPFNLGRLIRLVKEYHLLNPVIVDCTSSQAVADQYADFLREGFHVVTPNKKANTSSMDYYHQLRYAAEKSRRKFLYDTNVGAGLPVIENLQNLLNAGDELMKFSGILSGSLSYIFGKLDEGMSFSEATTLAREMGYTEPDPRDDLSGMDVARKLLILARETGRELELADIEIEPVLPAEFNAEGDVAAFMANLSQLDDLFAARVAKARDEGKVLRYVGNIDEDGVCRVKIAEVDGNDPLFKVKNGENLAFYSHYYQPLPLVLRGYGAGNDVTAAGVFADLLRTLSWKLGV

SEQ ID NO: 181 - protein, 819 aa, Escherichia coli
MRVLKFGGTSVANAERFLRVADILESNARQGQVATVLSAPAKITNHLVAMIEKTISGQDALPNISDAERIFAELLTGLAAAQPGFPLAQLKTFVDQEFAQIKHVLHGISLLGQCPDSINAALICRGEKMSIAIMAGVLEARGHNVTVIDPVEKLLAVGHYLESTVDIAESTRRIAASRIPADHMVLMAGFTAGNEKGELVVLGRNGSDYSAAVLAACLRADCCEIWTDVDGVYTCDPRQVPDARLLKSMSYQEAMELSYFGAKVLHPRTITPIAQFQIPCLIKNTGNPQAPGTLIGASRDEDELPVKGISNLNNMAMFSVSGPGMKGMVGMAARVFAAMSRARISVVLITQSSSEYSISFCVPQSDCVRAERAMQEEFYLELKEGLLEPLAVTERLAIISVVGDGMRTLRGISAKFFAALARANINIVAIAQGSSERSISVVVNNDDATTGVRVTHQMLFNTDQVIEVFVIGVGGVGGALLEQLKRQQSWLKNKHIDLRVCGVANSKALLTNVHGLNLENWQEELAQAKEPFNLGRLIRLVKEYHLLNPVIVDCTSSQAVADQYADFLREGFHVVTPNKKANTSSMDYYHQLRYAAEKSRRKFLYDTNVGAGLPVIENLQNLLNADELMKFSGILSGSLSYIFGKLDEGMSFSEATTLAREMGYTEPDPRDDLSGMDVARKLLILARETGRELELADIEIEPVLPAEFNAEGDVAAFMANLSQLDDLFAARVAKARDEGKVLRYVGNIDEDGVCRVKIAEVDGNDPLFKVKNGENALAFYSHYYQPLPLVLRGYGAGNDVTAAGVFADLLRTLSWKLGV

SEQ ID NO: 182 - protein, 819 aa, Escherichia coli
MRVLKFGGTSVANAERFLRVADILESNARQGQVATVLSAPAKITNHLVAMIEKTISGQDALPNISDAERIFAELLTGLAAAQPGFPLAQLKTFVDQEFAQIKHVLHGISLLGQCPDSINAALICRGEKMSIAIMAGVLEARGHNVTVIDPVEKLLAVGHYLESTVDIAESTRRIAASRIPADHMVLMAGFTAGNEKGELVVLGRNGSDYSAAVLAACLRADCCEIWTDVDGVYTCDPRQVPDARLLKSMSYQEAMELSYFGAKVLHPRTITPIAQFQIPCLIKNTGNPQAPGTLIGASRDEDELPVKGISNLNNMAMFSVSGPGMKGMVGMAARVFAAMSRARISVVLITQSSSEYSISFCVPQSDCVRAERAMQEEFYLELKEGLLEPLAVTERLAIISVVGDGMRTLRGISAKFFAALARANINIVAIAQGSSERSISVVVNNDDATTGVRVTHQMLFNTDQVIEVFVIGVGGVGGALLEQLKRQQSWLKNKHIDLRVCGVANSKALLTNVHGLNLENWQEELAQAKEPFNLGRLIRLVKEYHLLNPVIVDCTSSQAVADQYADFLREGFHVVTPNKKNTSSMDYYHQLRYAAEKSRRKFLYDTNVGAGLPVIENLQNLLNAGDELMKFSGILSGSLSYIFGKLDEGMSFSEATTLAREMGYTEPDPRDDLSGMDVARKLLILARETGRELELADIEIEPVLPAEFNAEGDVAAFMANLSQLDDLFAARVAKARDEGKVLRYVGNIDEDGVCRVKIAEVDGNDPLFKVKNGENALAFYSHYYQPLPLVLRGYGAGNDVTAAGVFADLLRTLSWKLGV

SEQ ID NO: 183 - protein, 819 aa, Escherichia coli
MRVLKFGGTSVANAERFLRVADILESNARQGQVATVLSAPAKITNHLVAMIEKTISGQDALPNISDAERIFAELLTGLAAAQPGFPLAQLKTFVDQEFAQIKHVLHGISLLGQCPDSINAALICRGEKMSIAIMAGVLEARGHNVTVIDPVEKLLAVGHYLESTVDIAESTRRIAASRIPADHMVLMAGFTAGNEKGELVVLGRNGSDYSAAVLAACLRADCCEIWTDVDGVYTCDPRQVPDARLLKSMSYQEAMELSYFGAKVLHPRTITPIAQFQIPCLIKNTGNPQAPGTLIGASRDEDELPVKGISNLNNMAMFSVSGPGMKGMVGMAARVFAAMSRARISVVLITQSSSEYSISFCVPQSDCVRAERAMQEEFYLELKEGLLEPLAVTERLAIISVVGDGMRTLRGISAKFFAALARANINIVAIAQGSSERSISVVVNNDDATTGVRVTHQMLFNTDQVIEVFVIGVGGVGGALLEQLKRQQSWLKNKHIDLRVCGVANSKALLTNVHGLNLENWQEELAQAKEPFNLGRLIRLVKEYHLLNPVIVDCTSSQAVADQYADFLREGFHVVTPNKKANTSSMDYYHQLRYAAEKSRRKFLYDTNVGAGLPVIENLQNLLNAGDELMKFSGILSGSLSYIFGKLDEGMSFSEATTLAREMGYTEPDPRDDLSGMDVARKLILARETGRELELADIEIEPVLPAEFNAEGDVAAFMANLSQLDDLFAARVAKARDEGKVLRYVGNIDEDGVCRVKIAEVDGNDPLFKVKNGENALAFYSHYYQPLPLVLRGYGAGNDVTAAGVFADLLRTLSWKLGV

SEQ ID NO: 184 - protein, 819 aa, Escherichia coli
MRVLKFGGTSVANAERFLRVADILESNARQGQVATVLSAPAKITNHLVAMIEKTISGQDALPNISDAERIFAELLTGLAAAQPGFPLAQLKTFVDQEFAQIKHVLHGISLLGQCPDSINAALICRGEKMSIAIMAGVLEARGHNVTVIDPVEKLLAVGHYLESTVDIAESTRRIAASRIPADHMVLMAGFTAGNEKGELVVLGRNGSDYSAAVLAACLRADCCEIWTDVDGVYTCDPRQVPDARLLKSMSYQEAMELSYFGAKVLHPRTITPIAQFQIPCLIKNTGNPQAPGTLIGASRDEDELPVKGISNLNNMAMFSVSGPGMKGMVGMAARVFAAMSRARISVVLITQSSSEYSISFCVPQSDCVRAERAMQEEFYLELKEGLLEPLAVTERLAIISVVGDGMRTLRGISAKFFAALARANINIVAIAQGSSERSISVVVNNDDATTGVRVTHQMLFNTDQVIEVFVIGVGGVGGALLEQLKRQQSWLKNKHIDLRVCGVANSKALLTNVHGLNLENWQEELAQAKEPFNLGRLIRLVKEYHLLNPVIVDCTSSQAVADQYADFLREGFHVVTPNKKANTSSMDYYHQLRYAAEKSRRKFLYDTNVGAGLPVIENLQNLLNAGDELMKFSGILSGSLSYIFGKLDEGMSFSEATTLAREMGYTEPDPRDDLSGDVARKLLILARETGRELELADIEIEPVLPAEFNAEGDVAAFMANLSQLDDLFAARVAKARDEGKVLRYVGNIDEDGVCRVKIAEVDGNDPLFKVKNGENALAFYSHYYQPLPLVLRGYGAGNDVTAAGVFADLLRTLSWKLGV

SEQ ID NO: 185 - protein, 819 aa, Escherichia coli
MRVLKFGGTSVANAERFLRVADILESNARQGQVATVLSAPAKITNHLVAMIEKTISGQDALPNISDAERIFAELLTGLAAAQPGFPLAQLKTFVDQEFAQIKHVLHGISLLGQCPDSINAALICRGEKMSIAIMAGVLEARGHNVTVIDPVEKLLAVGHYLESTVDIAESTRRIAASRIPADHMVLMAGFTAGNEKGELVVLGRNGSDYSAAVLAACLRADCCEIWTDVDGVYTCDPRQVPDARLLKSMSYQEAMELSYFGAKVLHPRTITPIAQFQIPCLIKNTGNPQAPGTLIGASRDEDELPVKGISNLNNMAMFSVSGPGMKGMVGMAARVFAAMSRARISVVLITQSSSEYSISFCVPQSDCVRAERAMQEEFYLELKEGLLEPLAVTERLAIISVVGDGMRTLRGISAKFFAALARANINIVAIAQGSSERSISVVVNNDDATTGVRVTHQMLFNTDQVIEVFVIGVGGVGGALLEQLKRQQSWLKNKHIDLRVCGVANSKALLTNVHGLNLENWQEELAQAKEPFNLGRLIRLVKEYHLLNPVIVDCTSSQAVADQYADFLREGFHVVTPNKKANTSSMDYYHQLRYAAEKSRRKFLYDTNVGAGLPVIENLQNLLNAGDELMKFSGILSGSLSYIFGKLDEGMSFSEATTLAREMGYTEPDPDDLSGMDVARKLLILARETGRELELADIEIEPVLPAEFNAEGDVAAFMANLSQLDDLFAARVAKARDEGKVLRYVGNIDEDGVCRVKIAEVDGNDPLFKVKNGENALAFYSHYYQPLPLVLRGYGAGNDVTAAGVFADLLRTLSWKLGV

SEQ ID NO: 186 - protein, 819 aa, Escherichia coli
MRVLKFGGTSVANAERFLRVADILESNARQGQVATVLSAPAKITNHLVAMIEKTISGQDALPNISDAERIFAELLTGLAAAQPGFPLAQLKTFVDQEFAQIKHVLHGISLLGQCPDSINAALICRGEKMSIAIMAGVLEARGHNVTVIDPVEKLLAVGHYLESTVDIAESTRRIAASRIPADHMVLMAGFTAGNEKGELVVLGRNGSDYSAAVLAACLRADCCEIWTDVDGVYTCDPRQVPDARLLKSMSYQEAMELSYFGAKVLHPRTITPIAQFQIPCLIKNTGNPQAPGTLIGASRDEDELPVKGISNLNNMAMFSVSGPGMKGMVGMAARVFAAMSRARISVVLITQSSSEYSISFCVPQSDCVRAERAMQEEFYLELKEGLLEPLAVTERLAIISVVGDGMRTLRGISAKFFAALARANINIVAIAQGSSERSISVVVNNDDATTGVRVTHQMLFNTDQVIEVFVIGVGGVGGALLEQLKRQQSWLKNKHIDLRVCGVANSKALLTNVHGLNLENWQEELAQAKEPFNLGRLIRLVKEYHLLNPVIVDCTSSQAVADQYADFLREGFHVVTPNKKANTSSDYYHQLRYAAEKSRRKFLYDTNVGAGLPVIENLQNLLNAGDELMKFSGILSGSLSYIFGKLDEGMSFSEATTLAREMGYTEPDPRDDLSGMDVARKLLILARETGRELELADIEIEPVLPAEFNAEGDVAAFMANLSQLDDLFAARVAKARDEGKVLRYVGNIDEDGVCRVKIAEVDGNDPLFKVKNGENALAFYSHYYQPLPLVLRGYGAGNDVTAAGVFADLLRTLSWKLGV

SEQ ID NO: 187 - protein, 819 aa, Escherichia coli
MRVLKFGGTSVANAERFLRVADILESNARQGQVATVLSAPAKITNHLVAMIEKTISGQDALPNISDAERIFAELLTGLAAAQPGFPLAQLKTFVDQEFAQIKHVLHGISLLGQCPDSINAALICRGEKMSIAIMAGVLEARGHNVTVIDPVEKLLAVGHYLESTVDIAESTRRIAASRIPADHMVLMAGFTAGNEKGELVVLGRNGSDYSAAVLAACLRADCCEIWTDVDGVYTCDPRQVPDARLLKSMSYQEAMELSYFGAKVLHPRTITPIAQFQIPCLIKNTGNPQAPGTLIGASRDEDELPVKGISNLNNMAMFSVSGPGMKGMVGMAARVFAAMSRARISVVLITQSSSEYSISFCVPQSDCVRAERAMQEEFYLELKEGLLEPLAVTERLAIISVVGDGMRTLRGISAKFFAALARANINIVAIAQGSSERSISVVVNNDDATTGVRVTHQMLFNTDQVIEVFVIGVGGVGGALLEQLKRQQSWLKNKHIDLRVCGVANSKALLTNVHGLNLENWQEELAQAKEPFNLGRLIRLVKEYHLLNPVIVDCTSSQAVADQYADFLREGFHVVTPNKKANTSSMDYYHQLRYAAEKSRRKFLYDTNVGAGLPVIENLQNLLNAGDELMKFSGILSGSLSYIFGKLDEGMSFSEATTLAREMGYTEPDPRDDLSGMDVARKLLILARETGRELELADIEIEPVLPAEFNAEGDVAAFMANLSQLDDLFAARVAKARDEGKVLYVGNIDEDGVCRVKIAEVDGNDPLFKVKNGENALAFYSHYYQPLPLVLRGYGAGNDVTAAGVFADLLRTLSWKLGV

SEQ ID NO: 188 - protein, 819 aa, Escherichia coli
MRVLKFGGTSVANAERFLRVADILESNARQGQVATVLSAPAKITNHLVAMIEKTISGQDALPNISDAERIFAELLTGLAAAQPGFPLAQLKTFVDQEFAQIKHVLHGISLLGQCPDSINAALICRGEKMSIAIMAGVLEARGHNVTVIDPVEKLLAVGHYLESTVDIAESTRRIAASRIPADHMVLMAGFTAGNEKGELVVLGRNGSDYSAAVLAACLRADCCEIWTDVDGVYTCDPRQVPDARLLKSMSYQEAMELSYFGAKVLHPRTITPIAQFQIPCLIKNTGNPQAPGTLIGASRDEDELPVKGISNLNNMAMFSVSGPGMKGMVGMAARVFAAMSRARISVVLITQSSSEYSISFCVPQSDCVRAERAMQEEFYLELKEGLLEPLAVTERLAIISVVGDGMRTLRGISAKFFAALARANINIVAIAQGSSERSISVVVNNDDATTGVRVTHQMLFNTDQVIEVFVIGVGGVGGALLEQLKRQQSWLKNKHIDLRVCGVANSKALLTNVHGLNLENWQEELAQAKEPFNLGRLIRLVKEYHLLNPVIVDCTSSQAVADQYADFLREGFHVVTPNKKANTSSMDYYHQLRYAAEKSRRKFLYDTNVGAGLPVIENLQNLLNAGDELMKFSGILSSLSYIFGKLDEGMSFSEATTLAREMGYTEPDPRDDLSGMDVARKLLILARETGRELELADIEIEPVLPAEFNAEGDVAAFMANLSQLDDLFAARVAKARDEGKVLRYVGNIDEDGVCRVKIAEVDGNDPLFKVKNGENALAFYSHYYQPLPLVLRGYGAGNDVTAAGVFADLLRTLSWKLGV

SEQ ID NO: 189 - protein, 819 aa, Escherichia coli
MRVLKFGGTSVANAERFLRVADILESNARQGQVATVLSAPAKITNHLVAMIEKTISGQDALPNISDAERIFAELLTGLAAAQPGFPLAQLKTFVDQEFAQIKHVLHGISLLGQCPDSINAALICRGEKMSIAIMAGVLEARGHNVTVIDPVEKLLAVGHYLESTVDIAESTRRIAASRIPADHMVLMAGFTAGNEKGELVVLGRNGSDYSAAVLAACLRADCCEIWTDVDGVYTCDPRQVPDARLLKSMSYQEAMELSYFGAKVLHPRTITPIAQFQIPCLIKNTGNPQAPGTLIGASRDEDELPVKGISNLNNMAMFSVSGPGMKGMVGMAARVFAAMSRARISVVLITQSSSEYSISFCVPQSDCVRAERAMQEEFYLELKEGLLEPLAVTERLAIISVVGDGMRTLRGISAKFFAALARANINIVAIAQGSSERSISVVVNNDDATTGVRVTHQMLFNTDQVIEVFVIGVGGVGGALLEQLKRQQSWLKNKHIDLRVCGVANSKALLTNVHGLNLENWQEELAQAKEPFNLGRLIRLVKEYHLLNPVIVDCTSSQAVADQYADFLREGFHVVTPNKKANTSSMDYYHQLRYAAEKSRRKFLYDTNVGAGLPVIENLQNLLNAGDELMKFSGILSGSLSYIFGKLDEGMSFSEATTLAREMGYTEPDPRDDLSGMDVRKLLILARETGRELELADIEIEPVLPAEFNAEGDVAAFMANLSQLDDLFAARVAKARDEGKVLRYVGNIDEDGVCRVKIAEVDGNDPLFKVKNGENALAFYSHYYQPLPLVLRGYGAGNDVTAAGVFADLLRTLSWKLGV

SEQ ID NO: 190 - protein, 819 aa, Escherichia coli
MRVLKFGGTSVANAERFLRVADILESNARQGQVATVLSAPAKITNHLVAMIEKTISGQDALPNISDAERIFAELLTGLAAAQPGFPLAQLKTFVDQEFAQIKHVLHGISLLGQCPDSINAALICRGEKMSIAIMAGVLEARGHNVTVIDPVEKLLAVGHYLESTVDIAESTRRIAASRIPADHMVLMAGFTAGNEKGELVVLGRNGSDYSAAVLAACLRADCCEIWTDVDGVYTCDPRQVPDARLLKSMSYQEAMELSYFGAKVLHPRTITPIAQFQIPCLIKNTGNPQAPGTLIGASRDEDELPVKGISNLNNMAMFSVSGPGMKGMVGMAARVFAAMSRARISVVLITQSSSEYSISFCVPQSDCVRAERAMQEEFYLELKEGLLEPLAVTERLAIISVVGDGMRTLRGISAKFFAALARANINIVAIAQGSSERSISVVVNNDDATTGVRVTHQMLFNTDQVIEVFVIGVGGVGGALLEQLKRQQSWLKNKHIDLRVCGVANSKALLTNVHGLNLENWQEELAQAKEPFNLGRLIRLVKEYHLLNPVIVDCTSSQAVADQYADFLREGFHVVTPNKKANTSSMDYYHQLRYAAEKSRRKFLYDTNVGAGLPVIENLQNLLNAGDELMKFSGILSGSLSYIFGKLEGMSFSEATTLAREMGYTEPDPRDDLSGMDVARKLLILARETGRELELADIEIEPVLPAEFNAEGDVAAFMANLSQLDDLFAARVAKARDEGKVLRYVGNIDEDGVCRVKIAEVDGNDPLFKVKNGENALAFYSHYYQPLPLVLRGYGAGNDVTAAGVFADLLRTLSWKLGV

SEQ ID NO: 191 - protein, 819 aa, Escherichia coli
MRVLKFGGTSVANAERFLRVADILESNARQGQVATVLSAPAKITNHLVAMIEKTISGQDALPNISDAERIFAELLTGLAAAQPGFPLAQLKTFVDQEFAQIKHVLHGISLLGQCPDSINAALICRGEKMSIAIMAGVLEARGHNVTVIDPVEKLLAVGHYLESTVDIAESTRRIAASRIPADHMVLMAGFTAGNEKGELVVLGRNGSDYSAAVLAACLRADCCEIWTDVDGVYTCDPRQVPDARLLKSMSYQEAMELSYFGAKVLHPRTITPIAQFQIPCLIKNTGNPQAPGTLIGASRDEDELPVKGISNLNNMAMFSVSGPGMKGMVGMAARVFAAMSRARISVVLITQSSSEYSISFCVPQSDCVRAERAMQEEFYLELKEGLLEPLAVTERLAIISVVGDGMRTLRGISAKFFAALARANINIVAIAQGSSERSISVVVNNDDATTGVRVTHQMLFNTDQVIEVFVIGVGGVGGALLEQLKRQQSWLKNKHIDLRVCGVANSKALLTNVHGLNLENWQEELAQAKEPFNLGRLIRLVKEYHLLNPVIVDCTSSQAVADQYADFLREGFHVVTPNKKANTSSMDYYHQLRYAAEKSRRKFLYDTNVGAGLPVIENLQNLLNAGDELMKFSGILSGSLSYIFGKLDEGMSFSEATTLAREMGYTEPDPRDDLSGMDVARKLLILARETGRELELADIEIEPVLPAEFNAEGDVAAFMANLSQLDDLFAARVAKARDEGKVLRYVGNIDEDVCRVKIAEVDGNDPLFKVKNGENALAFYSHYYQPLPLVLRGYGAGNDVTAAGVFADLLRTLSWKLGV

SEQ ID NO: 192 - protein, 819 aa, Escherichia coli
MRVLKFGGTSVANAERFLRVADILESNARQGQVATVLSAPAKITNHLVAMIEKTISGQDALPNISDAERIFAELLTGLAAAQPGFPLAQLKTFVDQEFAQIKHVLHGISLLGQCPDSINAALICRGEKMSIAIMAGVLEARGHNVTVIDPVEKLLAVGHYLESTVDIAESTRRIAASRIPADHMVLMAGFTAGNEKGELVVLGRNGSDYSAAVLAACLRADCCEIWTDVDGVYTCDPRQVPDARLLKSMSYQEAMELSYFGAKVLHPRTITPIAQFQIPCLIKNTGNPQAPGTLIGASRDEDELPVKGISNLNNMAMFSVSGPGMKGMVGMAARVFAAMSRARISVVLITQSSSEYSISFCVPQSDCVRAERAMQEEFYLELKEGLLEPLAVTERLAIISVVGDGMRTLRGISAKFFAALARANINIVAIAQGSSERSISVVVNNDDATTGVRVTHQMLFNTDQVIEVFVIGVGGVGGALLEQLKRQQSWLKNKHIDLRVCGVANSKALLTNVHGLNLENWQEELAQAKEPFNLGRLIRLVKEYHLLNPVIVDCTSSQAVADQYADFLREGFHVVTPNKKANTSSMDYYHQLRYAAEKSRRKFLYDTNVGAGLPVIENLQNLLNAGDELMKFSGILSGSLSYIFGKLDEGMSFSEATTLAREMGYTEPDPRDDLSGMDVAKLLILARETGRELELADIEIEPVLPAEFNAEGDVAAFMANLSQLDDLFAARVAKARDEGKVLRYVGNIDEDGVCRVKIAEVDGNDPLFKVKNGENALAFYSHYYQPLPLVLRGYGAGNDVTAAGVFADLLRTLSWKLGV

SEQ ID NO: 193 - protein, 819 aa, Escherichia coli
MRVLKFGGTSVANAERFLRVADILESNARQGQVATVLSAPAKITNHLVAMIEKTISGQDALPNISDAERIFAELLTGLAAAQPGFPLAQLKTFVDQEFAQIKHVLHGISLLGQCPDSINAALICRGEKMSIAIMAGVLEARGHNVTVIDPVEKLLAVGHYLESTVDIAESTRRIAASRIPADHMVLMAGFTAGNEKGELVVLGRNGSDYSAAVLAACLRADCCEIWTDVDGVYTCDPRQVPDARLLKSMSYQEAMELSYFGAKVLHPRTITPIAQFQIPCLIKNTGNPQAPGTLIGASRDEDELPVKGISNLNNMAMFSVSGPGMKGMVGMAARVFAAMSRARISVVLITQSSSEYSISFCVPQSDCVRAERAMQEEFYLELKEGLLEPLAVTERLAIISVVGDGMRTLRGISAKFFAALARANINIVAIAQGSSERSISVVVNNDDATTGVRVTHQMLFNTDQVIEVFVIGVGGVGGALLEQLKRQQSWLKNKHIDLRVCGVANSKALLTNVHGLNLENWQEELAQAKEPFNLGRLIRLVKEYHLLNPVIVDCTSSQAVADQYADFLREGFHVVTPNKKANTSSMDYYHQLRYAAEKSRRKFLYDTNVGAGLPVIENLQNLLNAGDELMKFSGILSGSLSYIFGKLDEGMSFSEATLAREMGYTEPDPRDDLSGMDVARKLLILARETGRELELADIEIEPVLPAEFNAEGDVAAFMANLSQLDDLFAARVAKARDEGKVLRYVGNIDEDGVCRVKIAEVDGNDPLFKVKNGENALAFYSHYYQPLPLVLRGYGAGNDVTAAGVFADLLRTLSWKLGV

SEQ ID NO: 194 - protein, 819 aa, Escherichia coli
MRVLKFGGTSVANAERFLRVADILESNARQGQVATVLSAPAKITNHLVAMIEKTISGQDALPNISDAERIFAELLTGLAAAQPGFPLAQLKTFVDQEFAQIKHVLHGISLLGQCPDSINAALICRGEKMSIAIMAGVLEARGHNVTVIDPVEKLLAVGHYLESTVDIAESTRRIAASRIPADHMVLMAGFTAGNEKGELVVLGRNGSDYSAAVLAACLRADCCEIWTDVDGVYTCDPRQVPDARLLKSMSYQEAMELSYFGAKVLHPRTITPIAQFQIPCLIKNTGNPQAPGTLIGASRDEDELPVKGISNLNNMAMFSVSGPGMKGMVGMAARVFAAMSRARISVVLITQSSSEYSISFCVPQSDCVRAERAMQEEFYLELKEGLLEPLAVTERLAIISVVGDGMRTLRGISAKFFAALARANINIVAIAQGSSERSISVVVNNDDATTGVRVTHQMLFNTDQVIEVFVIGVGGVGGALLEQLKRQQSWLKNKHIDLRVCGVANSKALLTNVHGLNLENWQEELAQAKEPFNLGRLIRLVKEYHLLNPVIVDCTSSQAVADQYADFLREGFHVVTPNKKANTSSMDYYHQLRYAAEKSRRKFLYDTNVGAGLPVIENLQNLLNAGDELMKFSGILSGSLSYIFGKLDEGMSFSEATTLAREMGYTEPDPRDDLSGMDVARKLLILARETGRELELADIEIEPVLPAEFNAEGDVAAFMANLSQLDDLFAARVAKARDEGKVLRYVGIDEDGVCRVKIAEVDGNDPLFKVKNGENALAFYSHYYQPLPLVLRGYGAGNDVTAAGVFADLLRTLSWKLGV

SEQ ID NO: 195 - protein, 819 aa, Escherichia coli
MRVLKFGGTSVANAERFLRVADILESNARQGQVATVLSAPAKITNHLVAMIEKTISGQDALPNISDAERIFAELLTGLAAAQPGFPLAQLKTFVDQEFAQIKHVLHGISLLGQCPDSINAALICRGEKMSIAIMAGVLEARGHNVTVIDPVEKLLAVGHYLESTVDIAESTRRIAASRIPADHMVLMAGFTAGNEKGELVVLGRNGSDYSAAVLAACLRADCCEIWTDVDGVYTCDPRQVPDARLLKSMSYQEAMELSYFGAKVLHPRTITPIAQFQIPCLIKNTGNPQAPGTLIGASRDEDELPVKGISNLNNMAMFSVSGPGMKGMVGMAARVFAAMSRARISVVLITQSSSEYSISFCVPQSDCVRAERAMQEEFYLELKEGLLEPLAVTERLAIISVVGDGMRTLRGISAKFFAALARANINIVAIAQGSSERSISVVVNNDDATTGVRVTHQMLFNTDQVIEVFVIGVGGVGGALLEQLKRQQSWLKNKHIDLRVCGVANSKALLTNVHGLNLENWQEELAQAKEPFNLGRLIRLVKEYHLLNPVIVDCTSSQAVADQYADFLREGFHVVTPNKKANTSSMDYYHQLRYAAEKSRRKFLYDTNVGAGLPVIENLQNLLNAGDELMKFSGILSGSLSYIFGKLDEGMSFSEATTLAREMGYTEPDPRDDLSGMDVARKLLILARETGRELELADIEIEPVLPAEFNAEGDVAAFMANLSQLDDLFAARVAKARDEGKVLRYVGNIDDGVCRVKIAEVDGNDPLFKVKNGENALAFYSHYYQPLPLVLRGYGAGNDVTAAGVFADLLRTLSWKLGV

SEQ ID NO: 196 - protein, 819 aa, Escherichia coli; identical to SEQ ID NO: 183

SEQ ID NO: 197 - protein, 819 aa, Escherichia coli
MRVLKFGGTSVANAERFLRVADILESNARQGQVATVLSAPAKITNHLVAMIEKTISGQDALPNISDAERIFAELLTGLAAAQPGFPLAQLKTFVDQEFAQIKHVLHGISLLGQCPDSINAALICRGEKMSIAIMAGVLEARGHNVTVIDPVEKLLAVGHYLESTVDIAESTRRIAASRIPADHMVLMAGFTAGNEKGELVVLGRNGSDYSAAVLAACLRADCCEIWTDVDGVYTCDPRQVPDARLLKSMSYQEAMELSYFGAKVLHPRTITPIAQFQIPCLIKNTGNPQAPGTLIGASRDEDELPVKGISNLNNMAMFSVSGPGMKGMVGMAARVFAAMSRARISVVLITQSSSEYSISFCVPQSDCVRAERAMQEEFYLELKEGLLEPLAVTERLAIISVVGDGMRTLRGISAKFFAALARANINIVAIAQGSSERSISVVVNNDDATTGVRVTHQMLFNTDQVIEVFVIGVGGVGGALLEQLKRQQSWLKNKHIDLRVCGVANSKALLTNVHGLNLENWQEELAQAKEPFNLGRLIRLVKEYHLLNPVIVDCTSSQAVADQYADFLREGFHVVTPNKKANTSSMDYYHQLRAAEKSRRKFLYDTNVGAGLPVIENLQNLLNAGDELMKFSGILSGSLSYIFGKLDEGMSFSEATTLAREMGYTEPDPRDDLSGMDVARKLLILARETGRELELADIEIEPVLPAEFNAEGDVAAFMANLSQLDDLFAARVAKARDEGKVLRYVGNIDEDGVCRVKIAEVDGNDPLFKVKNGENALAFYSHYYQPLPLVLRGYGAGNDVTAAGVFADLLRTLSWKLGV

SEQ ID NO: 198 - protein, 819 aa, Escherichia coli
MRVLKFGGTSVANAERFLRVADILESNARQGQVATVLSAPAKITNHLVAMIEKTISGQDALPNISDAERIFAELLTGLAAAQPGFPLAQLKTFVDQEFAQIKHVLHGISLLGQCPDSINAALICRGEKMSIAIMAGVLEARGHNVTVIDPVEKLLAVGHYLESTVDIAESTRRIAASRIPADHMVLMAGFTAGNEKGELVVLGRNGSDYSAAVLAACLRADCCEIWTDVDGVYTCDPRQVPDARLLKSMSYQEAMELSYFGAKVLHPRTITPIAQFQIPCLIKNTGNPQAPGTLIGASRDEDELPVKGISNLNNMAMFSVSGPGMKGMVGMAARVFAAMSRARISVVLITQSSSEYSISFCVPQSDCVRAERAMQEEFYLELKEGLLEPLAVTERLAIISVVGDGMRTLRGISAKFFAALARANINIVAIAQGSSERSISVVVNNDDATTGVRVTHQMLFNTDQVIEVFVIGVGGVGGALLEQLKRQQSWLKNKHIDLRVCGVANSKALLTNVHGLNLENWQEELAQAKEPFNLGRLIRLVKEYHLLNPVIVDCTSSQAVADQYADFLREGFHVVTPNKKANTSSMDYYHQLRYAAEKSRRKFLYDTNVGAGLPVIENLQNLLNAGDELMKFSGILSGSLSYIFGKLDEGMSFSEATTLAREMGYTEPDPRDDLSGMDVARKLLLARETGRELELADIEIEPVLPAEFNAEGDVAAFMANLSQLDDLFAARVAKARDEGKVLRYVGNIDEDGVCRVKIAEVDGNDPLFKVKNGENALAFYSHYYQPLPLVLRGYGAGNDVTAAGVFADLLRTLSWKLGV

SEQ ID NO: 199 - protein, 819 aa, Escherichia coli
MRVLKFGGTSVANAERFLRVADILESNARQGQVATVLSAPAKITNHLVAMIEKTISGQDALPNISDAERIFAELLTGLAAAQPGFPLAQLKTFVDQEFAQIKHVLHGISLLGQCPDSINAALICRGEKMSIAIMAGVLEARGHNVTVIDPVEKLLAVGHYLESTVDIAESTRRIAASRIPADHMVLMAGFTAGNEKGELVVLGRNGSDYSAAVLAACLRADCCEIWTDVDGVYTCDPRQVPDARLLKSMSYQEAMELSYFGAKVLHPRTITPIAQFQIPCLIKNTGNPQAPGTLIGASRDEDELPVKGISNLNNMAMFSVSGPGMKGMVGMAARVFAAMSRARISVVLITQSSSEYSISFCVPQSDCVRAERAMQEEFYLELKEGLLEPLAVTERLAIISVVGDGMRTLRGISAKFFAALARANINIVAIAQGSSERSISVVVNNDDATTGVRVTHQMLFNTDQVIEVFVIGVGGVGGALLEQLKRQQSWLKNKHIDLRVCGVANSKALLTNVHGLNLENWQEELAQAKEPFNLGRLIRLVKEYHLLNPVIVDCTSSQAVADQYADFLREGFHVVTPNKKANTSSMDYHQLRYAAEKSRRKFLYDTNVGAGLPVIENLQNLLNAGDELMKFSGILSGSLSYIFGKLDEGMSFSEATTLAREMGYTEPDPRDDLSGMDVARKLLILARETGRELELADIEIEPVLPAEFNAEGDVAAFMANLSQLDDLFAARVAKARDEGKVLRYVGNIDEDGVCRVKIAEVDGNDPLFKVKNGENALAFYSHYYQPLPLVLRGYGAGNDVTAAGVFADLLRTLSWKLGV

SEQ ID NO: 200 - protein, 819 aa, Escherichia coli
MRVLKFGGTSVANAERFLRVADILESNARQGQVATVLSAPAKITNHLVAMIEKTISGQDALPNISDAERIFAELLTGLAAAQPGFPLAQLKTFVDQEFAQIKHVLHGISLLGQCPDSINAALICRGEKMSIAIMAGVLEARGHNVTVIDPVEKLLAVGHYLESTVDIAESTRRIAASRIPADHMVLMAGFTAGNEKGELVVLGRNGSDYSAAVLAACLRADCCEIWTDVDGVYTCDPRQVPDARLLKSMSYQEAMELSYFGAKVLHPRTITPIAQFQIPCLIKNTGNPQAPGTLIGASRDEDELPVKGISNLNNMAMFSVSGPGMKGMVGMAARVFAAMSRARISVVLITQSSSEYSISFCVPQSDCVRAERAMQEEFYLELKEGLLEPLAVTERLAIISVVGDGMRTLRGISAKFFAALARANINIVAIAQGSSERSISVVVNNDDATTGVRVTHQMLFNTDQVIEVFVIGVGGVGGALLEQLKRQQSWLKNKHIDLRVCGVANSKALLTNVHGLNLENWQEELAQAKEPFNLGRLIRLVKEYHLLNPVIVDCTSSQAVADQYADFLREGFHVVTPNKKANTSSMDYYHQLRYAAEKSRRKFLYDTNVGAGLPVIENLQNLLNAGDELMKFSGILSGSLSYIFGKLDEGMSFSEATTLAREMGYTEPDPRDDLSGMDVARKLLILARETGRELELADIEIEPVLPAEFNAEGDVAAFMANLSQLDDLFAARVAKARDEGKVLRYVGNIDEDGVCRVKIEVDGNDPLFKVKNGENALAFYSHYYQPLPLVLRGYGAGNDVTAAGVFADLLRTLSWKLGV

SEQ ID NO: 201 - protein, 819 aa, Escherichia coli
MRVLKFGGTSVANAERFLRVADILESNARQGQVATVLSAPAKITNHLVAMIEKTISGQDALPNISDAERIFAELLTGLAAAQPGFPLAQLKTFVDQEFAQIKHVLHGISLLGQCPDSINAALICRGEKMSIAIMAGVLEARGHNVTVIDPVEKLLAVGHYLESTVDIAESTRRIAASRIPADHMVLMAGFTAGNEKGELVVLGRNGSDYSAAVLAACLRADCCEIWTDVDGVYTCDPRQVPDARLLKSMSYQEAMELSYFGAKVLHPRTITPIAQFQIPCLIKNTGNPQAPGTLIGASRDEDELPVKGISNLNNMAMFSVSGPGMKGMVGMAARVFAAMSRARISVVLITQSSSEYSISFCVPQSDCVRAERAMQEEFYLELKEGLLEPLAVTERLAIISVVGDGMRTLRGISAKFFAALARANINIVAIAQGSSERSISVVVNNDDATTGVRVTHQMLFNTDQVIEVFVIGVGGVGGALLEQLKRQQSWLKNKHIDLRVCGVANSKALLTNVHGLNLENWQEELAQAKEPFNLGRLIRLVKEYHLLNPVIVDCTSSQAVADQYADFLREGFHVVTPNKKANTSSMDYYHQLRYAAEKSRRKFLYDTNVGAGLPVIENLQNLLNAGDELMKFSGILSGSLSYIFGKLDEGMSFSETTLAREMGYTEPDPRDDLSGMDVARKLLILARETGRELELADIEIEPVLPAEFNAEGDVAAFMANLSQLDDLFAARVAKARDEGKVLRYVGNIDEDGVCRVKIAEVDGNDPLFKVKNGENALAFYSHYYQPLPLVLRGYGAGNDVTAAGVFADLLRTLSWKLGV

SEQ ID NO: 202 - protein, 819 aa, Escherichia coli
MRVLKFGGTSVANAERFLRVADILESNARQGQVATVLSAPAKITNHLVAMIEKTISGQDALPNISDAERIFAELLTGLAAAQPGFPLAQLKTFVDQEFAQIKHVLHGISLLGQCPDSINAALICRGEKMSIAIMAGVLEARGHNVTVIDPVEKLLAVGHYLESTVDIAESTRRIAASRIPADHMVLMAGFTAGNEKGELVVLGRNGSDYSAAVLAACLRADCCEIWTDVDGVYTCDPRQVPDARLLKSMSYQEAMELSYFGAKVLHPRTITPIAQFQIPCLIKNTGNPQAPGTLIGASRDEDELPVKGISNLNNMAMFSVSGPGMKGMVGMAARVFAAMSRARISVVLITQSSSEYSISFCVPQSDCVRAERAMQEEFYLELKEGLLEPLAVTERLAIISVVGDGMRTLRGISAKFFAALARANINIVAIAQGSSERSISVVVNNDDATTGVRVTHQMLFNTDQVIEVFVIGVGGVGGALLEQLKRQQSWLKNKHIDLRVCGVANSKALLTNVHGLNLENWQEELAQAKEPFNLGRLIRLVKEYHLLNPVIVDCTSSQAVADQYADFLREGFHVVTPNKKANTSSMDYYHQLRYAEKSRRKFLYDTNVGAGLPVIENLQNLLNAGDELMKFSGILSGSLSYIFGKLDEGMSFSEATTLAREMGYTEPDPRDDLSGMDVARKLLILARETGRELELADIEIEPVLPAEFNAEGDVAAFMANLSQLDDLFAARVAKARDEGKVLRYVGNIDEDGVCRVKIAEVDGNDPLFKVKNGENALAFYSHYYQPLPLVLRGYGAGNDVTAAGVFADLLRTLSWKLGV

SEQ ID NO: 203 - protein, 819 aa, Escherichia coli
MRVLKFGGTSVANAERFLRVADILESNARQGQVATVLSAPAKITNHLVAMIEKTISGQDALPNISDAERIFAELLTGLAAAQPGFPLAQLKTFVDQEFAQIKHVLHGISLLGQCPDSINAALICRGEKMSIAIMAGVLEARGHNVTVIDPVEKLLAVGHYLESTVDIAESTRRIAASRIPADHMVLMAGFTAGNEKGELVVLGRNGSDYSAAVLAACLRADCCEIWTDVDGVYTCDPRQVPDARLLKSMSYQEAMELSYFGAKVLHPRTITPIAQFQIPCLIKNTGNPQAPGTLIGASRDEDELPVKGISNLNNMAMFSVSGPGMKGMVGMAARVFAAMSRARISVVLITQSSSEYSISFCVPQSDCVRAERAMQEEFYLELKEGLLEPLAVTERLAIISVVGDGMRTLRGISAKFFAALARANINIVAIAQGSSERSISVVVNNDDATTGVRVTHQMLFNTDQVIEVFVIGVGGVGGALLEQLKRQQSWLKNKHIDLRVCGVANSKALLTNVHGLNLENWQEELAQAKEPFNLGRLIRLVKEYHLLNPVIVDCTSSQAVADQYADFLREGFHVVTPNKKANTSSMDYYHQLRYAAEKSRRKFLYDTNVGAGLPVIENLQNLLNAGDELMKFSGILSGSLSYIFGKLDEGMSFSEATTLAREMYTEPDPRDDLSGMDVARKLLILARETGRELELADIEIEPVLPAEFNAEGDVAAFMANLSQLDDLFAARVAKARDEGKVLRYVGNIDEDGVCRVKIAEVDGNDPLFKVKNGENALAFYSHYYQPLPLVLRGYGAGNDVTAAGVFADLLRTLSWKLGV

SEQ ID NO: 204 - protein, 819 aa, Escherichia coli
MRVLKFGGTSVANAERFLRVADILESNARQGQVATVLSAPAKITNHLVAMIEKTISGQDALPNISDAERIFAELLTGLAAAQPGFPLAQLKTFVDQEFAQIKHVLHGISLLGQCPDSINAALICRGEKMSIAIMAGVLEARGHNVTVIDPVEKLLAVGHYLESTVDIAESTRRIAASRIPADHMVLMAGFTAGNEKGELVVLGRNGSDYSAAVLAACLRADCCEIWTDVDGVYTCDPRQVPDARLLKSMSYQEAMELSYFGAKVLHPRTITPIAQFQIPCLIKNTGNPQAPGTLIGASRDEDELPVKGISNLNNMAMFSVSGPGMKGMVGMAARVFAAMSRARISVVLITQSSSEYSISFCVPQSDCVRAERAMQEEFYLELKEGLLEPLAVTERLAIISVVGDGMRTLRGISAKFFAALARANINIVAIAQGSSERSISVVVNNDDATTGVRVTHQMLFNDQVIEVFVIGVGGVGGALLEQLKRQQSWLKNKHIDLRVCGVANSKALLTNVHGLNLENWQEELAQAKEPFNLGRLIRLVKEYHLLNPVIVDCTSSQAVADQYADFLREGFHVVTPNKKANTSSMDYYHQLRYAAEKSRRKFLYDTNVGAGLPVIENLQNLLNAGDELMKFSGILSGSLSYIFGKLDEGMSFSEATTLAREMGYTEPDPRDDLSGMDVARKLLILARETGRELELADIEIEPVLPAEFNAEGDVAAFMANLSQLDDLFAARVAKARDEGKVLRYVGNIDEDGVCRVKIAEVDGNDPLFKVKNGENALAFYSHYYQPLPLVLRGYGAGNDVTAAGVFADLLRTLSWKLGV

SEQ ID NO: 205 - protein, 819 aa, Escherichia coli
MRVLKFGGTSVANAERFLRVADILESNARQGQVATVLSAPAKITNHLVAMIEKTISGQDALPNISDAERIFAELLTGLAAAQPGFPLAQLKTFVDQEFAQIKHVLHGISLLGQCPDSINAALICRGEKMSIAIMAGVLEARGHNVTVIDPVEKLLAVGHYLESTVDIAESTRRIAASRIPADHMVLMAGFTAGNEKGELVVLGRNGSDYSAAVLAACLRADCCEIWTDVDGVYTCDPRQVPDARLLKSMSYQEAMELSYFGAKVLHPRTITPIAQFQIPCLIKNTGNPQAPGTLIGASRDEDELPVKGISNLNNMAMFSVSGPGMKGMVGMAARVFAAMSRARISVVLITQSSSEYSISFCVPQSDCVRAERAMQEEFYLELKEGLLEPLAVTERLAIISVVGDGMRTLRGISAKFFAALARANINIVAIAQGSSERSISVVVNNDDATTGVRVTHQMLFNTDQVIEVFVIGVGGVGGALLEQLKRQQSWLKNKHIDLRVCGVNSKALLTNVHGLNLENWQEELAQAKEPFNLGRLIRLVKEYHLLNPVIVDCTSSQAVADQYADFLREGFHVVTPNKKANTSSMDYYHQLRYAAEKSRRKFLYDTNVGAGLPVIENLQNLLNAGDELMKFSGILSGSLSYIFGKLDEGMSFSEATTLAREMGYTEPDPRDDLSGMDVARKLLILARETGRELELADIEIEPVLPAEFNAEGDVAAFMANLSQLDDLFAARVAKARDEGKVLRYVGNIDEDGVCRVKIAEVDGNDPLFKVKNGENALAFYSHYYQPLPLVLRGYGAGNDVTAAGVFADLLRTLSWKLGV

SEQ ID NO: 206 - protein, 819 aa, Escherichia coli
MRVLKFGGTSVANAERFLRVADILESNARQGQVATVLSAPAKITNHLVAMIEKTISGQDALPNISDAERIFAELLTGLAAAQPGFPLAQLKTFVDQEFAQIKHVLHGISLLGQCPDSINAALICRGEKMSIAIMAGVLEARGHNVTVIDPVEKLLAVGHYLESTVDIAESTRRIAASRIPADHMVLMAGFTAGNEKGELVVLGRNGSDYSAAVLAACLRADCCEIWTDVDGVYTCDPRQVPDARLLKSMSYQEAMELSYFGAKVLHPRTITPIAQFQIPCLIKNTGNPQAPGTLIGASRDEDELPVKGISNLNNMAMFSVSGPGMKGMVGMAARVFAAMSRARISVVLITQSSSEYSISFCVPQSDCVRAERAMQEEFYLELKEGLLEPLAVTERLAIISVVGDGMRTLRGISAKFFAALARANINIVAIAQGSSERSISVVVNNDDATTGVRVTHQMLFNTDQVIEVFVIGVGGVGGALLEQLKRQQSWLKNKHIDLRVCGVANSKALLTNVHGLNLENWQEELAQAKEPFNLGRLIRLVKEYHLLNPVIVDCTSSQAVADQYADFLREGFHVVTPNKKANTSSMDYYHQLRYAAEKSRRKFLYDTNVGAGLPVIENLQNLLNAGDELMKFSGILSGSLSYIFGKDEGMSFSEATTLAREMGYTEPDPRDDLSGMDVARKLLILARETGRELELADIEIEPVLPAEFNAEGDVAAFMANLSQLDDLFAARVAKARDEGKVLRYVGNIDEDGVCRVKIAEVDGNDPLFKVKNGENALAFYSHYYQPLPLVLRGYGAGNDVTAAGVFADLLRTLSWKLGV

SEQ ID NO: 207 - protein, 819 aa, Escherichia coli
MRVLKFGGTSVANAERFLRVADILESNARQGQVATVLSAPAKITNHLVAMIEKTISGQDALPNISDAERIFAELLTGLAAAQPGFPLAQLKTFVDQEFAQIKHVLHGISLLGQCPDSINAALICRGEKMSIAIMAGVLEARGHNVTVIDPVEKLLAVGHYLESTVDIAESTRRIAASRIPADHMVLMAGFTAGNEKGELVVLGRNGSDYSAAVLAACLRADCCEIWTDVDGVYTCDPRQVPDARLLKSMSYQEAMELSYFGAKVLHPRTITPIAQFQIPCLIKNTGNPQAPGTLIGASRDEDELPVKGISNLNNMAMFSVSGPGMKGMVGMAARVFAAMSRARISVVLITQSSSEYSISFCVPQSDCVRAERAMQEEFYLELKEGLLEPLAVTERLAIISVVGDGMRTLRGISAKFFAALARANINIVAIAQGSSERSISVVVNNDDATTGVRVTHQMLFNTDQVIEVFVIGVGGVGGALLEQLKRQQSWLKNKHIDLRVCGVANSKALLTNVHGLNLENWQEELAQAKEPFNLGRLIRLVKEYHLLNPVIVDCTSSQAVADQYADFLREGFHVVTPNKKANTSSMDYYHQLRYAAEKSRRKFLYDTNVGAGLPVIENLQNLLNAGDELMKFSGILSGSLSYIFGKLDEGMSFSEATTLAREMGYTEPDPRDDLSGMDVARKLLILARETGRELELADIEIEPVLPAEFNAEGDVAAFMANLSQLDDLFAARVAKARDEGKVLRYVGNDEDGVCRVKIAEVDGNDPLFKVKNGENALAFYSHYYQPLPLVLRGYGAGNDVTAAGVFADLLRTLSWKLGV

SEQ ID NO: 208 - protein, 819 aa, Escherichia coli
MRVLKFGGTSVANAERFLRVADILESNARQGQVATVLSAPAKITNHLVAMIEKTISGQDALPNISDAERIFAELLTGLAAAQPGFPLAQLKTFVDQEFAQIKHVLHGISLLGQCPDSINAALICRGEKMSIAIMAGVLEARGHNVTVIDPVEKLLAVGHYLESTVDIAESTRRIAASRIPADHMVLMAGFTAGNEKGELVVLGRNGSDYSAAVLAACLRADCCEIWTDVDGVYTCDPRQVPDARLLKSMSYQEAMELSYFGAKVLHPRTITPIAQFQIPCLIKNTGNPQAPGTLIGASRDEDELPVKGISNLNNMAMFSVSGPGMKGMVGMAARVFAAMSRARISVVLITQSSSEYSISFCVPQSDCVRAERAMQEEFYLELKEGLLEPLAVTERLAIISVVGDGMRTLRGISAKFFAALARANINIVAIAQGSSERSISVVVNNDDATTGVRVTHQMLFNTDQVIEVFVIGVGGVGGALLEQLKRQQSWLKNKHIDLRVCGVANSKALLTNVHGLNLENWQEELAQAKEPFNLGRLIRLVKEYHLLNPVIVDCTSSQAVADQYADFLREGFHVVTPNKKANTSSMDYYHQLRYAAEKSRRKFLYDTNVGAGLPVIENLQNLLNAGDELMKFSGILSGSLSYIFGKLDEGMSFSEATTLAREMGYTEPDPRDDLSGMDVARKLLILARETGRELELADIEIEPVPAEFNAEGDVAAFMANLSQLDDLFAARVAKARDEGKVLRYVGNIDEDGVCRVKIAEVDGNDPLFKVKNGENALAFYSHYYQPLPLVLRGYGAGNDVTAAGVFADLLRTLSWKLGV

SEQ ID NO: 209 - protein, 819 aa, Escherichia coli
MRVLKFGGTSVANAERFLRVADILESNARQGQVATVLSAPAKITNHLVAMIEKTISGQDALPNISDAERIFAELLTGLAAAQPGFPLAQLKTFVDQEFAQIKHVLHGISLLGQCPDSINAALICRGEKMSIAIMAGVLEARGHNVTVIDPVEKLLAVGHYLESTVDIAESTRRIAASRIPADHMVLMAGFTAGNEKGELVVLGRNGSDYSAAVLAACLRADCCEIWTDVDGVYTCDPRQVPDARLLKSMSYQEAMELSYFGAKVLHPRTITPIAQFQIPCLIKNTGNPQAPGTLIGASRDEDELPVKGISNLNNMAMFSVSGPGMKGMVGMAARVFAAMSRARISVVLITQSSSEYSISFCVPQSDCVRAERAMQEEFYLELKEGLLEPLAVTERLAIISVVGDGMRTLRGISAKFFAALARANINIVAIAQGSSERSISVVVNNDDATTGVRVTHQMLFNTDQVIEVFVIGVGGVGGALLEQLKRQQSWLKNKHIDLRVCGVANSKALTNVHGLNLENWQEELAQAKEPFNLGRLIRLVKEYHLLNPVIVDCTSSQAVADQYADFLREGFHVVTPNKKANTSSMDYYHQLRYAAEKSRRKFLYDTNVGAGLPVIENLQNLLNAGDELMKFSGILSGSLSYIFGKLDEGMSFSEATTLAREMGYTEPDPRDDLSGMDVARKLLILARETGRELELADIEIEPVLPAEFNAEGDVAAFMANLSQLDDLFAARVAKARDEGKVLRYVGNIDEDGVCRVKIAEVDGNDPLFKVKNGENALAFYSHYYQPLPLVLRGYGAGNDVTAAGVFADLLRTLSWKLGV

SEQ ID NO: 210 - protein, 819 aa, Escherichia coli
MRVLKFGGTSVANAERFLRVADILESNARQGQVATVLSAPAKITNHLVAMIEKTISGQDALPNISDAERIFAELLTGLAAAQPGFPLAQLKTFVDQEFAQIKHVLHGISLLGQCPDSINAALICRGEKMSIAIMAGVLEARGHNVTVIDPVEKLLAVGHYLESTVDIAESTRRIAASRIPADHMVLMAGFTAGNEKGELVVLGRNGSDYSAAVLAACLRADCCEIWTDVDGVYTCDPRQVPDARLLKSMSYQEAMELSYFGAKVLHPRTITPIAQFQIPCLIKNTGNPQAPGTLIGASRDEDELPVKGISNLNNMAMFSVSGPGMKGMVGMAARVFAAMSRARISVVLITQSSSEYSISFCVPQSDCVRAERAMQEEFYLELKEGLLEPLAVTERLAIISVVGDGMRTLRGISAKFFAALARANINIVAIAQGSSERSISVVVNNDDATTGVRVTHQMLFNTDQVIEVFVIGVGGVGGALLEQLKRQQSWLKNKHIDLRVCGVANSKALLTNVHGLNLENWQEELAQAKEPFNLGRLIRLVKEYHLLNPVIVDCTSSQAVADQYADFLREGFHVVTPNKKANTSSMDYYHQLRYAAEKSRRKFLYDTNVGAGLPVIENLQNLLNAGDELMKFSGILSGSLSYIFGKLDEGMSFSEATTLAREMGYTEPDPRDDLSGMDVARKLLILARETGRELELADIEIEPVLPAENAEGDVAAFMANLSQLDDLFAARVAKARDEGKVLRYVGNIDEDGVCRVKIAEVDGNDPLFKVKNGENALAFYSHYYQPLPLVLRGYGAGNDVTAAGVFADLLRTLSWKLGV

SEQ ID NO: 211 - protein, 819 aa, Escherichia coli
MRVLKFGGTSVANAERFLRVADILESNARQGQVATVLSAPAKITNHLVAMIEKTISGQDALPNISDAERIFAELLTGLAAAQPGFPLAQLKTFVDQEFAQIKHVLHGISLLGQCPDSINAALICRGEKMSIAIMAGVLEARGHNVTVIDPVEKLLAVGHYLESTVDIAESTRRIAASRIPADHMVLMAGFTAGNEKGELVVLGRNGSDYSAAVLAACLRADCCEIWTDVDGVYTCDPRQVPDARLLKSMSYQEAMELSYFGAKVLHPRTITPIAQFQIPCLIKNTGNPQAPGTLIGASRDEDELPVKGISNLNNMAMFSVSGPGMKGMVGMAARVFAAMSRARISVVLITQSSSEYSISFCVPQSDCVRAERAMQEEFYLELKEGLLEPLAVTERLAIISVVGDGMRTLRGISAKFFAALARANINIVAIAQGSSERSISVVVNNDDATTGVRVTHQMLFNTDQVIEVFVIGVGGVGGALLEQLKRQQSWLKNKHIDLRVCGVANSKALLTNVHGLNLENWQEELAQAKEPFNLGRLIRLVKEYHLLNPVIVDCTSSQAVADQYADFLREGFHVVTPNKKANTSSMDYYHQLRYAAEKSRRKFLYDTNVGAGLPVIENLQNLLNAGDELMKFSGILSGSLSIFGKLDEGMSFSEATTLAREMGYTEPDPRDDLSGMDVARKLLILARETGRELELADIEIEPVLPAEFNAEGDVAAFMANLSQLDDLFAARVAKARDEGKVLRYVGNIDEDGVCRVKIAEVDGNDPLFKVKNGENALAFYSHYYQPLPLVLRGYGAGNDVTAAGVFADLLRTLSWKLGV

SEQ ID NO: 212 - protein, 819 aa, Escherichia coli
MRVLKFGGTSVANAERFLRVADILESNARQGQVATVLSAPAKITNHLVAMIEKTISGQDALPNISDAERIFAELLTGLAAAQPGFPLAQLKTFVDQEFAQIKHVLHGISLLGQCPDSINAALICRGEKMSIAIMAGVLEARGHNVTVIDPVEKLLAVGHYLESTVDIAESTRRIAASRIPADHMVLMAGFTAGNEKGELVVLGRNGSDYSAAVLAACLRADCCEIWTDVDGVYTCDPRQVPDARLLKSMSYQEAMELSYFGAKVLHPRTITPIAQFQIPCLIKNTGNPQAPGTLIGASRDEDELPVKGISNLNNMAMFSVSGPGMKGMVGMAARVFAAMSRARISVVLITQSSSEYSISFCVPQSDCVRAERAMQEEFYLELKEGLLEPLAVTERLAIISVVGDGMRTLRGISAKFFAALARANINIVAIAQGSSERSISVVVNNDDATTGVRVTHQMLFNTDQVIEVFVIGVGGVGGALLEQLKRQQSWLKNKHIDLRVCGVANSKALLTNVHGLNLENWQEELAQAKEPFNLGRLIRLVKEYHLLNPVIVDCTSSQVADQYADFLREGFHVVTPNKKANTSSMDYYHQLRYAAEKSRRKFLYDTNVGAGLPVIENLQNLLNAGDELMKFSGILSGSLSYIFGKLDEGMSFSEATTLAREMGYTEPDPRDDLSGMDVARKLLILARETGRELELADIEIEPVLPAEFNAEGDVAAFMANLSQLDDLFAARVAKARDEGKVLRYVGNIDEDGVCRVKIAEVDGNDPLFKVKNGENALAFYSHYYQPLPLVLRGYGAGNDVTAAGVFADLLRTLSWKLGV

SEQ ID NO: 213 - protein, 819 aa, Escherichia coli
MRVLKFGGTSVANAERFLRVADILESNARQGQVATVLSAPAKITNHLVAMIEKTISGQDALPNISDAERIFAELLTGLAAAQPGFPLAQLKTFVDQEFAQIKHVLHGISLLGQCPDSINAALICRGEKMSIAIMAGVLEARGHNVTVIDPVEKLLAVGHYLESTVDIAESTRRIAASRIPADHMVLMAGFTAGNEKGELVVLGRNGSDYSAAVLAACLRADCCEIWTDVDGVYTCDPRQVPDARLLKSMSYQEAMELSYFGAKVLHPRTITPIAQFQIPCLIKNTGNPQAPGTLIGASRDEDELPVKGISNLNNMAMFSVSGPGMKGMVGMAARVFAAMSRARISVVLITQSSSEYSISFCVPQSDCVRAERAMQEEFYLELKEGLLEPLAVTERLAIISVVGDGMRTLRGISAKFFAALARANINIVAIAQGSSERSISVVVNNDDATTGVRVTHQMLFNTDQVIEVFVIGVGGVGGALLEQLKRQQSWLKNKHIDLRVCGVANSKALLTNVHGLNLENWQEELAQAKEPFNLGRLIRLVKEYHLLNPVIVDCTSSQAVADQYADFLREGFHVVTPNKKANTSSMDYYHQLRYAAEKSRRKFLYDTNVGAGLPVIENLQNLLNAGDELMKFSGILSGSLSYIFGKLDEGMSFSEATTLAREMGYTEPDPRDDSGMDVARKLLILARETGRELELADIEIEPVLPAEFNAEGDVAAFMANLSQLDDLFAARVAKARDEGKVLRYVGNIDEDGVCRVKIAEVDGNDPLFKVKNGENALAFYSHYYQPLPLVLRGYGAGNDVTAAGVFADLLRTLSWKLGV

SEQ ID NO: 214 - protein, 819 aa, Escherichia coli
MRVLKFGGTSVANAERFLRVADILESNARQGQVATVLSAPAKITNHLVAMIEKTISGQDALPNISDAERIFAELLTGLAAAQPGFPLAQLKTFVDQEFAQIKHVLHGISLLGQCPDSINAALICRGEKMSIAIMAGVLEARGHNVTVIDPVEKLLAVGHYLESTVDIAESTRRIAASRIPADHMVLMAGFTAGNEKGELVVLGRNGSDYSAAVLAACLRADCCEIWTDVDGVYTCDPRQVPDARLLKSMSYQEAMELSYFGAKVLHPRTITPIAQFQIPCLIKNTGNPQAPGTLIGASRDEDELPVKGISNLNNMAMFSVSGPGMKGMVGMAARVFAAMSRARISVVLITQSSSEYSISFCVPQSDCVRAERAMQEEFYLELKEGLLEPLAVTERLAIISVVGDGMRTLRGISAKFFAALARANINIVAIAQGSSERSISVVVNNDDATTGVRVTHQMLFNTDQVIEVFVIGVGGVGGALLEQLKRQQSWLKNKHIDLRVCGVANSKALLTNVHGLNLENWQEELAQAKEPFNLGRLIRLVKEYHLLNPVIVDCTSSQAVADQYADFLREGFHVVTPNKANTSSMDYYHQLRYAAEKSRRKFLYDTNVGAGLPVIENLQNLLNAGDELMKFSGILSGSLSYIFGKLDEGMSFSEATTLAREMGYTEPDPRDDLSGMDVARKLLILARETGRELELADIEIEPVLPAEFNAEGDVAAFMANLSQLDDLFAARVAKARDEGKVLRYVGNIDEDGVCRVKIAEVDGNDPLFKVKNGENALAFYSHYYQPLPLVLRGYGAGNDVTAAGVFADLLRTLSWKLGV

SEQ ID NO: 215 - protein, 819 aa, Escherichia coli
MRVLKFGGTSVANAERFLRVADILESNARQGQVATVLSAPAKITNHLVAMIEKTISGQDALPNISDAERIFAELLTGLAAAQPGFPLAQLKTFVDQEFAQIKHVLHGISLLGQCPDSINAALICRGEKMSIAIMAGVLEARGHNVTVIDPVEKLLAVGHYLESTVDIAESTRRIAASRIPADHMVLMAGFTAGNEKGELVVLGRNGSDYSAAVLAACLRADCCEIWTDVDGVYTCDPRQVPDARLLKSMSYQEAMELSYFGAKVLHPRTITPIAQFQIPCLIKNTGNPQAPGTLIGASRDEDELPVKGISNLNNMAMFSVSGPGMKGMVGMAARVFAAMSRARISVVLITQSSSEYSISFCVPQSDCVRAERAMQEEFYLELKEGLLEPLAVTERLAIISVVGDGMRTLRGISAKFFAALARANINIVAIAQGSSERSISVVVNNDDATTGVRVTHQMLFNTDQVIEVFVIGVGGVGGALLEQLKRQQSWLKNKHIDLRVCGVANSKALLTNVHGLNLENWQEELAQAKEPFNLGRLIRLVKEYHLLNPVIVDCTSSQAVADQYADFLREGFHVVTPNKKANTSSMDYYHQLRYAAEKSRRKFLYDTNVGAGLPVIENLQNLLNAGDELMKFSGLSGSLSYIFGKLDEGMSFSEATTLAREMGYTEPDPRDDLSGMDVARKLLILARETGRELELADIEIEPVLPAEFNAEGDVAAFMANLSQLDDLFAARVAKARDEGKVLRYVGNIDEDGVCRVKIAEVDGNDPLFKVKNGENALAFYSHYYQPLPLVLRGYGAGNDVTAAGVFADLLRTLSWKLGV

SEQ ID NO: 216 - protein, 819 aa, Escherichia coli
MRVLKFGGTSVANAERFLRVADILESNARQGQVATVLSAPAKITNHLVAMIEKTISGQDALPNISDAERIFAELLTGLAAAQPGFPLAQLKTFVDQEFAQIKHVLHGISLLGQCPDSINAALICRGEKMSIAIMAGVLEARGHNVTVIDPVEKLLAVGHYLESTVDIAESTRRIAASRIPADHMVLMAGFTAGNEKGELVVLGRNGSDYSAAVLAACLRADCCEIWTDVDGVYTCDPRQVPDARLLKSMSYQEAMELSYFGAKVLHPRTITPIAQFQIPCLIKNTGNPQAPGTLIGASRDEDELPVKGISNLNNMAMFSVSGPGMKGMVGMAARVFAAMSRARISVVLITQSSSEYSISFCVPQSDCVRAERAMQEEFYLELKEGLLEPLAVTERLAIISVVGDGMRTLRGISAKFFAALARANINIVAIAQGSSERSISVVVNNDDATTGVRVTHQMLFNTDQVIEVFVIGVGGVGGALLEQLKRQQSWLKNKHIDLRVCGVANSKALLTNVHGLNLENWQEELAQAKEPFNLGRLIRLVKEYHLLNPVIVDCTSSQAVADQYADFLREGFHVVTPNKKANTSSMDYYHQLRYAAEKSRRKFLYDTNVGAGLPVIENLQNLLNAGDELMKFSGILSGSLSYIFGKLDEGMSFSEATTLAREMGYTEPDPRDDLSGMDVARKLLIARETGRELELADIEIEPVLPAEFNAEGDVAAFMANLSQLDDLFAARVAKARDEGKVLRYVGNIDEDGVCRVKIAEVDGNDPLFKVKNGENALAFYSHYYQPLPLVLRGYGAGNDVTAAGVFADLLRTLSWKLGV

SEQ ID NO: 217 - protein, 819 aa, Escherichia coli
MRVLKFGGTSVANAERFLRVADILESNARQGQVATVLSAPAKITNHLVAMIEKTISGQDALPNISDAERIFAELLTGLAAAQPGFPLAQLKTFVDQEFAQIKHVLHGISLLGQCPDSINAALICRGEKMSIAIMAGVLEARGHNVTVIDPVEKLLAVGHYLESTVDIAESTRRIAASRIPADHMVLMAGFTAGNEKGELVVLGRNGSDYSAAVLAACLRADCCEIWTDVDGVYTCDPRQVPDARLLKSMSYQEAMELSYFGAKVLHPRTITPIAQFQIPCLIKNTGNPQAPGTLIGASRDEDELPVKGISNLNNMAMFSVSGPGMKGMVGMAARVFAAMSRARISVVLITQSSSEYSISFCVPQSDCVRAERAMQEEFYLELKEGLLEPLAVTERLAIISVVGDGMRTLRGISAKFFAALARANINIVAIAQGSSERSISVVVNNDDATTGVRVTHQMLFNTDQVIEVFVIGVGGVGGALLEQLKRQQSWLKNKHIDLRVCGVANSKALLTNVHGLNLENWQEELAQAKEPFNLGRLIRLVKEYHLLNPVIVDCTSSQAVADQYADFLREGFHVVTPNKKANTSSMDYYHQLRYAAEKSRRKFLYDTNVGAGLPVIENLQNLLNGDELMKFSGILSGSLSYIFGKLDEGMSFSEATTLAREMGYTEPDPRDDLSGMDVARKLLILARETGRELELADIEIEPVLPAEFNAEGDVAAFMANLSQLDDLFAARVAKARDEGKVLRYVGNIDEDGVCRVKIAEVDGNDPLFKVKNGENALAFYSHYYQPLPLVLRGYGAGNDVTAAGVFADLLRTLSWKLGV

SEQ ID NO: 218 - protein, 819 aa, Escherichia coli
MRVLKFGGTSVANAERFLRVADILESNARQGQVATVLSAPAKITNHLVAMIEKTISGQDALPNISDAERIFAELLTGLAAAQPGFPLAQLKTFVDQEFAQIKHVLHGISLLGQCPDSINAALICRGEKMSIAIMAGVLEARGHNVTVIDPVEKLLAVGHYLESTVDIAESTRRIAASRIPADHMVLMAGFTAGNEKGELVVLGRNGSDYSAAVLAACLRADCCEIWTDVDGVYTCDPRQVPDARLLKSMSYQEAMELSYFGAKVLHPRTITPIAQFQIPCLIKNTGNPQAPGTLIGASRDEDELPVKGISNLNNMAMFSVSGPGMKGMVGMAARVFAAMSRARISVVLITQSSSEYSISFCVPQSDCVRAERAMQEEFYLELKEGLLEPLAVTERLAIISVVGDGMRTLRGISAKFFAALARANINIVAIAQGSSERSISVVVNNDDATTGVRVTHQMLFNTDQVIEVFVIGVGGVGGALLEQLKRQQSWLKNKHIDLRVCGVANSKALLTNVHGLNLENWQEELAQAKEPFNLGRLIRLVKEYHLLNPVIVDCTSSQAVADQYADFLREGFHVVTPNKKANTSSMDYYHQLRYAAEKSRRKFLYDTNVGAGLPVIENLQNLLNAGDELMKFSGILSGSLSYIFGKLDEGMSFSEATTLAREMGYTEPDPRDDLSGMDVARKLLILARETGRELELADIEIEPVLPAEFNAEGDVAAFMANLSQLDDLFAARVAKARDEGKVLRYVGNIDEDGVCRVKAEVDGNDPLFKVKNGENALAFYSHYYQPLPLVLRGYGAGNDVTAAGVFADLLRTLSWKLGV

SEQ ID NO: 219 - protein, 819 aa, Escherichia coli
MRVLKFGGTSVANAERFLRVADILESNARQGQVATVLSAPAKITNHLVAMIEKTISGQDALPNISDAERIFAELLTGLAAAQPGFPLAQLKTFVDQEFAQIKHVLHGISLLGQCPDSINAALICRGEKMSIAIMAGVLEARGHNVTVIDPVEKLLAVGHYLESTVDIAESTRRIAASRIPADHMVLMAGFTAGNEKGELVVLGRNGSDYSAAVLAACLRADCCEIWTDVDGVYTCDPRQVPDARLLKSMSYQEAMELSYFGAKVLHPRTITPIAQFQIPCLIKNTGNPQAPGTLIGASRDEDELPVKGISNLNNMAMFSVSGPGMKGMVGMAARVFAAMSRARISVVLITQSSSEYSISFCVPQSDCVRAERAMQEEFYLELKEGLLEPLAVTERLAIISVVGDGMRTLRGISAKFFAALARANINIVAIAQGSSERSISVVVNNDDATTGVRVTHQMLFNTDQVIEVFVIGVGGVGGLLEQLKRQQSWLKNKHIDLRVCGVANSKALLTNVHGLNLENWQEELAQAKEPFNLGRLIRLVKEYHLLNPVIVDCTSSQAVADQYADFLREGFHVVTPNKKANTSSMDYYHQLRYAAEKSRRKFLYDTNVGAGLPVIENLQNLLNAGDELMKFSGILSGSLSYIFGKLDEGMSFSEATTLAREMGYTEPDPRDDLSGMDVARKLLILARETGRELELADIEIEPVLPAEFNAEGDVAAFMANLSQLDDLFAARVAKARDEGKVLRYVGNIDEDGVCRVKIAEVDGNDPLFKVKNGENALAFYSHYYQPLPLVLRGYGAGNDVTAAGVFADLLRTLSWKLGV

SEQ ID NO: 220 - protein, 819 aa, Escherichia coli
MRVLKFGGTSVANAERFLRVADILESNARQGQVATVLSAPAKITNHLVAMIEKTISGQDALPNISDAERIFAELLTGLAAAQPGFPLAQLKTFVDQEFAQIKHVLHGISLLGQCPDSINAALICRGEKMSIAIMAGVLEARGHNVTVIDPVEKLLAVGHYLESTVDIAESTRRIAASRIPADHMVLMAGFTAGNEKGELVVLGRNGSDYSAAVLAACLRADCCEIWTDVDGVYTCDPRQVPDARLLKSMSYQEAMELSYFGAKVLHPRTITPIAQFQIPCLIKNTGNPQAPGTLIGASRDEDELPVKGISNLNNMAMFSVSGPGMKGMVGMAARVFAAMSRARISVVLITQSSSEYSISFCVPQSDCVRAERAMQEEFYLELKEGLLEPLAVTERLAIISVVGDGMRTLRGISAKFFAALARANINIVAIAQGSSERSISVVVNNDDATTGVRVTHQMLFNTDQVIEVFVIGVGGVGGALLEQLKRQQSWLKNKHIDLRVCGVANSKALLTNVHGLNLENWQEELAQAKEPFNLGRLIRLVKEYHLLNPVIVDCTSSQAVADQYADFLREGFHVVTPNKKANTSSMDYYHQLYAAEKSRRKFLYDTNVGAGLPVIENLQNLLNAGDELMKFSGILSGSLSYIFGKLDEGMSFSEATTLAREMGYTEPDPRDDLSGMDVARKLLILARETGRELELADIEIEPVLPAEFNAEGDVAAFMANLSQLDDLFAARVAKARDEGKVLRYVGNIDEDGVCRVKIAEVDGNDPLFKVKNGENALAFYSHYYQPLPLVLRGYGAGNDVTAAGVFADLLRTLSWKLGV

SEQ ID NO: 221 - protein, 819 aa, Escherichia coli
MRVLKFGGTSVANAERFLRVADILESNARQGQVATVLSAPAKITNHLVAMIEKTISGQDALPNISDAERIFAELLTGLAAAQPGFPLAQLKTFVDQEFAQIKHVLHGISLLGQCPDSINAALICRGEKMSIAIMAGVLEARGHNVTVIDPVEKLLAVGHYLESTVDIAESTRRIAASRIPADHMVLMAGFTAGNEKGELVVLGRNGSDYSAAVLAACLRADCCEIWTDVDGVYTCDPRQVPDARLLKSMSYQEAMELSYFGAKVLHPRTITPIAQFQIPCLIKNTGNPQAPGTLIGASRDEDELPVKGISNLNNMAMFSVSGPGMKGMVGMAARVFAAMSRARISVVLITQSSSEYSISFCVPQSDCVRAERAMQEEFYLELKEGLLEPLAVTERLAIISVVGDGMRTLRGISAKFFAALARANINIVAIAQGSSERSISVVVNNDDATTGVRVTHQMLFNTDQVIEVFVIGVGGVGGALLEQLKRQQWLKNKHIDLRVCGVANSKALLTNVHGLNLENWQEELAQAKEPFNLGRLIRLVKEYHLLNPVIVDCTSSQAVADQYADFLREGFHVVTPNKKANTSSMDYYHQLRYAAEKSRRKFLYDTNVGAGLPVIENLQNLLNAGDELMKFSGILSGSLSYIFGKLDEGMSFSEATTLAREMGYTEPDPRDDLSGMDVARKLLILARETGRELELADIEIEPVLPAEFNAEGDVAAFMANLSQLDDLFAARVAKARDEGKVLRYVGNIDEDGVCRVKIAEVDGNDPLFKVKNGENALAFYSHYYQPLPLVLRGYGAGNDVTAAGVFADLLRTLSWKLGV

SEQ ID NO: 222 - protein, 819 aa, Escherichia coli
MRVLKFGGTSVANAERFLRVADILESNARQGQVATVLSAPAKITNHLVAMIEKTISGQDALPNISDAERIFAELLTGLAAAQPGFPLAQLKTFVDQEFAQIKHVLHGISLLGQCPDSINAALICRGEKMSIAIMAGVLEARGHNVTVIDPVEKLLAVGHYLESTVDIAESTRRIAASRIPADHMVLMAGFTAGNEKGELVVLGRNGSDYSAAVLAACLRADCCEIWTDVDGVYTCDPRQVPDARLLKSMSYQEAMELSYFGAKVLHPRTITPIAQFQIPCLIKNTGNPQAPGTLIGASRDEDELPVKGISNLNNMAMFSVSGPGMKGMVGMAARVFAAMSRARISVVLITQSSSEYSISFCVPQSDCVRAERAMQEEFYLELKEGLLEPLAVTERLAIISVVGDGMRTLRGISAKFFAALARANINIVAIAQGSSERSISVVVNNDDATTGVRVTHQMLFNTDQVIEVFVIGVGGVGGALLEQLKRQQSWLKNKHIDLRVCGVANSKALLTNVHGLNLENWQEELAQAKEPFNLGRLIRLVKEYHLLNPVIVDCTSSQAVADQYAFLREGFHVVTPNKKANTSSMDYYHQLRYAAEKSRRKFLYDTNVGAGLPVIENLQNLLNAGDELMKFSGILSGSLSYIFGKLDEGMSFSEATTLAREMGYTEPDPRDDLSGMDVARKLLILARETGRELELADIEIEPVLPAEFNAEGDVAAFMANLSQLDDLFAARVAKARDEGKVLRYVGNIDEDGVCRVKIAEVDGNDPLFKVKNGENALAFYSHYYQPLPLVLRGYGAGNDVTAAGVFADLLRTLSWKLGV

SEQ ID NO: 223 - protein, 819 aa, Escherichia coli
MRVLKFGGTSVANAERFLRVADILESNARQGQVATVLSAPAKITNHLVAMIEKTISGQDALPNISDAERIFAELLTGLAAAQPGFPLAQLKTFVDQEFAQIKHVLHGISLLGQCPDSINAALICRGEKMSIAIMAGVLEARGHNVTVIDPVEKLLAVGHYLESTVDIAESTRRIAASRIPADHMVLMAGFTAGNEKGELVVLGRNGSDYSAAVLAACLRADCCEIWTDVDGVYTCDPRQVPDARLLKSMSYQEAMELSYFGAKVLHPRTITPIAQFQIPCLIKNTGNPQAPGTLIGASRDEDELPVKGISNLNNMAMFSVSGPGMKGMVGMAARVFAAMSRARISVVLITQSSSEYSISFCVPQSDCVRAERAMQEEFYLELKEGLLEPLAVTERLAIISVVGDGMRTLRGISAKFFAALARANINIVAIAQGSSERSISVVVNNDDATTGVRVTHQMLFNTDQVIEVFVIGVGGVGGALLEQLKRQQSWLKNKHIDLRVCGVANSKALLTNVHGLNLENWQEELAQAKEPFNLGRLIRLVKEYHLLNPVIVDCTSSQAVADQYADFLREGFHVVTPNKKANTSSMDYYHQLRYAAEKSRRKFLYDTNVGAGLPVIENLQNLLNAGDELMKFSGILSGSLSYIFGKLDEGMSFSEATTLAEMGYTEPDPRDDLSGMDVARKLLILARETGRELELADIEIEPVLPAEFNAEGDVAAFMANLSQLDDLFAARVAKARDEGKVLRYVGNIDEDGVCRVKIAEVDGNDPLFKVKNGENALAFYSHYYQPLPLVLRGYGAGNDVTAAGVFADLLRTLSWKLGV

SEQ ID NO: 224 - protein, 819 aa, Escherichia coli
MRVLKFGGTSVANAERFLRVADILESNARQGQVATVLSAPAKITNHLVAMIEKTISGQDALPNISDAERIFAELLTGLAAAQPGFPLAQLKTFVDQEFAQIKHVLHGISLLGQCPDSINAALICRGEKMSIAIMAGVLEARGHNVTVIDPVEKLLAVGHYLESTVDIAESTRRIAASRIPADHMVLMAGFTAGNEKGELVVLGRNGSDYSAAVLAACLRADCCEIWTDVDGVYTCDPRQVPDARLLKSMSYQEAMELSYFGAKVLHPRTITPIAQFQIPCLIKNTGNPQAPGTLIGASRDEDELPVKGISNLNNMAMFSVSGPGMKGMVGMAARVFAAMSRARISVVLITQSSSEYSISFCVPQSDCVRAERAMQEEFYLELKEGLLEPLAVTERLAIISVVGDGMRTLRGISAKFFAALARANINIVAIAQGSSERSISVVVNNDDATTGVRVTHQMLFNTDQVIEVFVIGVGGVGGALLEQLKRQQSWLKNKHIDLRVCGVANSKALLTNVHGLNLENWQEELAQAKEPFNLGRLIRLVKEYHLLNPVIVDCTSQAVADQYADFLREGFHVVTPNKKANTSSMDYYHQLRYAAEKSRRKFLYDTNVGAGLPVIENLQNLLNAGDELMKFSGILSGSLSYIFGKLDEGMSFSEATTLAREMGYTEPDPRDDLSGMDVARKLLILARETGRELELADIEIEPVLPAEFNAEGDVAAFMANLSQLDDLFAARVAKARDEGKVLRYVGNIDEDGVCRVKIAEVDGNDPLFKVKNGENALAFYSHYYQPLPLVLRGYGAGNDVTAAGVFADLLRTLSWKLGV

SEQ ID NO: 225 - protein, 819 aa, Escherichia coli
MRVLKFGGTSVANAERFLRVADILESNARQGQVATVLSAPAKITNHLVAMIEKTISGQDALPNISDAERIFAELLTGLAAAQPGFPLAQLKTFVDQEFAQIKHVLHGISLLGQCPDSINAALICRGEKMSIAIMAGVLEARGHNVTVIDPVEKLLAVGHYLESTVDIAESTRRIAASRIPADHMVLMAGFTAGNEKGELVVLGRNGSDYSAAVLAACLRADCCEIWTDVDGVYTCDPRQVPDARLLKSMSYQEAMELSYFGAKVLHPRTITPIAQFQIPCLIKNTGNPQAPGTLIGASRDEDELPVKGISNLNNMAMFSVSGPGMKGMVGMAARVFAAMSRARISVVLITQSSSEYSISFCVPQSDCVRAERAMQEEFYLELKEGLLEPLAVTERLAIISVVGDGMRTLRGISAKFFAALARANINIVAIAQGSSERSISVVVNNDDATTGVRVTHQMLFNTDQVIEVFVIGVGGVGGALLEQLKRQQSWLKNKHIDLRVCGVANSKALLTNVHGLNLENWQEELAQAKEPFNLGRLIRLVKEYHLLNPVIVDCTSSQAVADQYADFLREFHVVTPNKKANTSSMDYYHQLRYAAEKSRRKFLYDTNVGAGLPVIENLQNLLNAGDELMKFSGILSGSLSYIFGKLDEGMSFSEATTLAREMGYTEPDPRDDLSGMDVARKLLILARETGRELELADIEIEPVLPAEFNAEGDVAAFMANLSQLDDLFAARVAKARDEGKVLRYVGNIDEDGVCRVKIAEVDGNDPLFKVKNGENALAFYSHYYQPLPLVLRGYGAGNDVTAAGVFADLLRTLSWKLGV

SEQ ID NO: 226 - protein, 819 aa, Escherichia coli
MRVLKFGGTSVANAERFLRVADILESNARQGQVATVLSAPAKITNHLVAMIEKTISGQDALPNISDAERIFAELLTGLAAAQPGFPLAQLKTFVDQEFAQIKHVLHGISLLGQCPDSINAALICRGEKMSIAIMAGVLEARGHNVTVIDPVEKLLAVGHYLESTVDIAESTRRIAASRIPADHMVLMAGFTAGNEKGELVVLGRNGSDYSAAVLAACLRADCCEIWTDVDGVYTCDPRQVPDARLLKSMSYQEAMELSYFGAKVLHPRTITPIAQFQIPCLIKNTGNPQAPGTLIGASRDEDELPVKGISNLNNMAMFSVSGPGMKGMVGMAARVFAAMSRARISVVLITQSSSEYSISFCVPQSDCVRAERAMQEEFYLELKEGLLEPLAVTERLAIISVVGDGMRTLRGISAKFFAALARANINIVAIAQGSSERSISVVVNNDDATTGVRVTHQMLFNTDQVIEVFVIGVGGVGGALLEQLKRQQSWLKNKHIDLRVCGVANSKALLTNVHGLNLENWQEELAQAKEPFNLGRLIRLVKEYHLLNPVIVDCTSSQAVADQYADFLREGFHVVTPNKKANTSSMDYYHQLRYAAEKSRRKFLYDTNVGAGLPVIENLQNLLNAGDELMKFSGILSGSLSYIFGKLDEGMSFSEATTLAREMGYTEPDPRDDLSGMDVARKLLILARETGRELELADIEIEPVLPAEFNAEGDVAAFMANLSQLDDLFAARVAKARDEGKVLRYVGNIDEDGVCRVKIAEVDGNDPLFKVKNGENALAFYSHYYQPLPLVLRGYGAGNDVTAAGVFALLRTLSWKLGV

SEQ ID NO: 227 - protein, 819 aa, Escherichia coli
MRVLKFGGTSVANAERFLRVADILESNARQGQVATVLSAPAKITNHLVAMIEKTISGQDALPNISDAERIFAELLTGLAAAQPGFPLAQLKTFVDQEFAQIKHVLHGISLLGQCPDSINAALICRGEKMSIAIMAGVLEARGHNVTVIDPVEKLLAVGHYLESTVDIAESTRRIAASRIPADHMVLMAGFTAGNEKGELVVLGRNGSDYSAAVLAACLRADCCEIWTDVDGVYTCDPRQVPDARLLKSMSYQEAMELSYFGAKVLHPRTITPIAQFQIPCLIKNTGNPQAPGTLIGASRDEDELPVKGISNLNNMAMFSVSGPGMKGMVGMAARVFAAMSRARISVVLITQSSSEYSISFCVPQSDCVRAERAMQEEFYLELKEGLLEPLAVTERLAIISVVGDGMRTLRGISAKFFAALARANINIVAIAQGSSERSISVVVNNDDATTGVRVTHQMLFNTDQVIEVFVIGVGGGGALLEQLKRQQSWLKNKHIDLRVCGVANSKALLTNVHGLNLENWQEELAQAKEPFNLGRLIRLVKEYHLLNPVIVDCTSSQAVADQYADFLREGFHVVTPNKKANTSSMDYYHQLRYAAEKSRRKFLYDTNVGAGLPVIENLQNLLNAGDELMKFSGILSGSLSYIFGKLDEGMSFSEATTLAREMGYTEPDPRDDLSGMDVARKLLILARETGRELELADIEIEPVLPAEFNAEGDVAAFMANLSQLDDLFAARVAKARDEGKVLRYVGNIDEDGVCRVKIAEVDGNDPLFKVKNGENALAFYSHYYQPLPLVLRGYGAGNDVTAAGVFADLLRTLSWKLGV

SEQ ID NO: 228 - protein, 819 aa, Escherichia coli
MRVLKFGGTSVANAERFLRVADILESNARQGQVATVLSAPAKITNHLVAMIEKTISGQDALPNISDAERIFAELLTGLAAAQPGFPLAQLKTFVDQEFAQIKHVLHGISLLGQCPDSINAALICRGEKMSIAIMAGVLEARGHNVTVIDPVEKLLAVGHYLESTVDIAESTRRIAASRIPADHMVLMAGFTAGNEKGELVVLGRNGSDYSAAVLAACLRADCCEIWTDVDGVYTCDPRQVPDARLLKSMSYQEAMELSYFGAKVLHPRTITPIAQFQIPCLIKNTGNPQAPGTLIGASRDEDELPVKGISNLNNMAMFSVSGPGMKGMVGMAARVFAAMSRARISVVLITQSSSEYSISFCVPQSDCVRAERAMQEEFYLELKEGLLEPLAVTERLAIISVVGDGMRTLRGISAKFFAALARANINIVAIAQGSSERSISVVVNNDDATTGVRVTHQMLFNTDQVIEVFVIGVGGVGGALLEQLKRQQSWLKNKHIDRVCGVANSKALLTNVHGLNLENWQEELAQAKEPFNLGRLIRLVKEYHLLNPVIVDCTSSQAVADQYADFLREGFHVVTPNKKANTSSMDYYHQLRYAAEKSRRKFLYDTNVGAGLPVIENLQNLLNAGDELMKFSGILSGSLSYIFGKLDEGMSFSEATTLAREMGYTEPDPRDDLSGMDVARKLLILARETGRELELADIEIEPVLPAEFNAEGDVAAFMANLSQLDDLFAARVAKARDEGKVLRYVGNIDEDGVCRVKIAEVDGNDPLFKVKNGENALAFYSHYYQPLPLVLRGYGAGNDVTAAGVFADLLRTLSWKLGV

SEQ ID NO: 229 - protein, 819 aa, Escherichia coli; identical to SEQ ID NO: 228

SEQ ID NO: 230 - protein, 819 aa, Escherichia coli
MRVLKFGGTSVANAERFLRVADILESNARQGQVATVLSAPAKITNHLVAMIEKTISGQDALPNISDAERIFAELLTGLAAAQPGFPLAQLKTFVDQEFAQIKHVLHGISLLGQCPDSINAALICRGEKMSIAIMAGVLEARGHNVTVIDPVEKLLAVGHYLESTVDIAESTRRIAASRIPADHMVLMAGFTAGNEKGELVVLGRNGSDYSAAVLAACLRADCCEIWTDVDGVYTCDPRQVPDARLLKSMSYQEAMELSYFGAKVLHPRTITPIAQFQIPCLIKNTGNPQAPGTLIGASRDEDELPVKGISNLNNMAMFSVSGPGMKGMVGMAARVFAAMSRARISVVLITQSSSEYSISFCVPQSDCVRAERAMQEEFYLELKEGLLEPLAVTERLAIISVVGDGMRTLRGISAKFFAALARANINIVAIAQGSSERSISVVVNNDDATTGVRVTHQMLFNTDQVIEVFVIGVGGVGGALLEQLKRQQSWLKNKHIDLRVCGVANSKALLTNVHGLNLENWQEELAQAKEPFNLGRLIRLVKEYHLLNPVIVDCTSSQAVADQYADFLREGFHVVTPNKKANTSSMDYYHQLRYAAEKSRRKFLYDTNVGAGLPVIENLQNLLNAGDELMKFSGILSGSLSYIFGKLDEGMSFSEATTLAREMGYTEPDPRDDLSGMDVARKLLILARETGRELELADIEIEPVLPAEFNAEGDVAAFMANLSQLDDLFAARVAKARDEGKVLRYVGNIDEDGVRVKIAEVDGNDPLFKVKNGENALAFYSHYYQPLPLVLRGYGAGNDVTAAGVFADLLRTLSWKLGV

SEQ ID NO: 231 - protein, 819 aa, Escherichia coli; identical to SEQ ID NO: 230

SEQ ID NO: 232 - protein, 819 aa, Escherichia coli
MRVLKFGGTSVANAERFLRVADILESNARQGQVATVLSAPAKITNHLVAMIEKTISGQDALPNISDAERIFAELLTGLAAAQPGFPLAQLKTFVDQEFAQIKHVLHGISLLGQCPDSINAALICRGEKMSIAIMAGVLEARGHNVTVIDPVEKLLAVGHYLESTVDIAESTRRIAASRIPADHMVLMAGFTAGNEKGELVVLGRNGSDYSAAVLAACLRADCCEIWTDVDGVYTCDPRQVPDARLLKSMSYQEAMELSYFGAKVLHPRTITPIAQFQIPCLIKNTGNPQAPGTLIGASRDEDELPVKGISNLNNMAMFSVSGPGMKGMVGMAARVFAAMSRARISVVLITQSSSEYSISFCVPQSDCVRAERAMQEEFYLELKEGLLEPLAVTERLAIISVVGDGMRTLRGISAKFFAALARANINIVAIAQGSSERSISVVVNNDDATTGVRVTHQMLFNTDQVIEVFVIGVGGVGGALLEQLKRQQSWLKNKHIDLRVCGVANSKALLTNVHGLNLENWQEELAQAKEPFNLGRLIRLVKEYHLLNPVIVDCTSSQAVADQYADFLREGFHVVTPNKKANTSSMDYYHQLRYAAEKSRRKFLYDTNVGAGLPVIENLQNLLNAGDELMKFSGILSGSLSYIFGKLDEGMSFSEATTLAREMGYTEPDPRDDLSGMDVARKLLILARETGREELADIEIEPVLPAEFNAEGDVAAFMANLSQLDDLFAARVAKARDEGKVLRYVGNIDEDGVCRVKIAEVDGNDPLFKVKNGENALAFYSHYYQPLPLVLRGYGAGNDVTAAGVFADLLRTLSWKLGV

SEQ ID NO: 233 - protein, 819 aa, Escherichia coli
MRVLKFGGTSVANAERFLRVADILESNARQGQVATVLSAPAKITNHLVAMIEKTISGQDALPNISDAERIFAELLTGLAAAQPGFPLAQLKTFVDQEFAQIKHVLHGISLLGQCPDSINAALICRGEKMSIAIMAGVLEARGHNVTVIDPVEKLLAVGHYLESTVDIAESTRRIAASRIPADHMVLMAGFTAGNEKGELVVLGRNGSDYSAAVLAACLRADCCEIWTDVDGVYTCDPRQVPDARLLKSMSYQEAMELSYFGAKVLHPRTITPIAQFQIPCLIKNTGNPQAPGTLIGASRDEDELPVKGISNLNNMAMFSVSGPGMKGMVGMAARVFAAMSRARISVVLITQSSSEYSISFCVPQSDCVRAERAMQEEFYLELKEGLLEPLAVTERLAIISVVGDGMRTLRGISAKFFAALARANINIVAIAQGSSERSISVVVNNDDATTGVRVTHQMLFNTDQVIEVFVIGVGGVGGALLEQLKRQQSWLKNKHIDLRVCGVANSKALLTNVHGLNLENWQEELAQAKEPFNLGRLIRLVKEYHLLNPVIVDCTSSQAVADQYADFLREGFHVVTPNKKANTSSMDYYHQLRYAAEKSRRKFLYDTNVGAGLPVIENLQNLLNAGDELMKFSGILSGLSYIFGKLDEGMSFSEATTLAREMGYTEPDPRDDLSGMDVARKLLILARETGRELELADIEIEPVLPAEFNAEGDVAAFMANLSQLDDLFAARVAKARDEGKVLRYVGNIDEDGVCRVKIAEVDGNDPLFKVKNGENALAFYSHYYQPLPLVLRGYGAGNDVTAAGVFADLLRTLSWKLGV

SEQ ID NO: 234 - protein, 819 aa, Escherichia coli
MRVLKFGGTSVANAERFLRVADILESNARQGQVATVLSAPAKITNHLVAMIEKTISGQDALPNISDAERIFAELLTGLAAAQPGFPLAQLKTFVDQEFAQIKHVLHGISLLGQCPDSINAALICRGEKMSIAIMAGVLEARGHNVTVIDPVEKLLAVGHYLESTVDIAESTRRIAASRIPADHMVLMAGFTAGNEKGELVVLGRNGSDYSAAVLAACLRADCCEIWTDVDGVYTCDPRQVPDARLLKSMSYQEAMELSYFGAKVLHPRTITPIAQFQIPCLIKNTGNPQAPGTLIGASRDEDELPVKGISNLNNMAMFSVSGPGMKGMVGMAARVFAAMSRARISVVLITQSSSEYSISFCVPQSDCVRAERAMQEEFYLELKEGLLEPLAVTERLAIISVVGDGMRTLRGISAKFFAALARANINIVAIAQGSSERSISVVVNNDDATTGVRVTHQMLFNTDQVIEVFVIGVGGVGGALLEQLKRQQSWLKNKHIDLRVCGVANSKALLTNVHGLNLENWQEELAQAKEPFNLGRLIRLVKEYHLLNPVIVDCTSSQAVADQYADFLREGFHVVTPNKKANTSSMDYYHQLRYAAEKSRRKFLYDTNVGAGLPVIENLQNLLNAGDELMKFSGILSGSLSYIFGKLDEGMSFSEATTLAREMGYTEPDPRDDLSGMDVARKLLILARETGRELELADIEIEPVLPAEFNAEGDVAAFMANLSQLDDLFAARVAKARDEGKVLRYVGNIDEDGVCRVKIAEVDGNDPFKVKNGENALAFYSHYYQPLPLVLRGYGAGNDVTAAGVFADLLRTLSWKLGV

SEQ ID NO: 235 - protein, 819 aa, Escherichia coli; identical to SEQ ID NO: 199

SEQ ID NO: 236 - protein, 819 aa, Escherichia coli
MRVLKFGGTSVANAERFLRVADILESNARQGQVATVLSAPAKITNHLVAMIEKTISGQDALPNISDAERIFAELLTGLAAAQPGFPLAQLKTFVDQEFAQIKHVLHGISLLGQCPDSINAALICRGEKMSIAIMAGVLEARGHNVTVIDPVEKLLAVGHYLESTVDIAESTRRIAASRIPADHMVLMAGFTAGNEKGELVVLGRNGSDYSAAVLAACLRADCCEIWTDVDGVYTCDPRQVPDARLLKSMSYQEAMELSYFGAKVLHPRTITPIAQFQIPCLIKNTGNPQAPGTLIGASRDEDELPVKGISNLNNMAMFSVSGPGMKGMVGMAARVFAAMSRARISVVLITQSSSEYSISFCVPQSDCVRAERAMQEEFYLELKEGLLEPLAVTERLAIISVVGDGMRTLRGISAKFFAALARANINIVAIAQGSSERSISVVVNNDDATTGVRVTHQMLFNTDQVIEVFVIGVGGVGGALLEQLKRQQSWLKNKHIDLRVCGVANSKALLTNVHGLNLENWQEELAQAKEPFNLGRLIRLVKEYHLNPVIVDCTSSQAVADQYADFLREGFHVVTPNKKANTSSMDYYHQLRYAAEKSRRKFLYDTNVGAGLPVIENLQNLLNAGDELMKFSGILSGSLSYIFGKLDEGMSFSEATTLAREMGYTEPDPRDDLSGMDVARKLLILARETGRELELADIEIEPVLPAEFNAEGDVAAFMANLSQLDDLFAARVAKARDEGKVLRYVGNIDEDGVCRVKIAEVDGNDPLFKVKNGENALAFYSHYYQPLPLVLRGYGAGNDVTAAGVFADLLRTLSWKLGV

SEQ ID NO: 237 - protein, 819 aa, Escherichia coli
MRVLKFGGTSVANAERFLRVADILESNARQGQVATVLSAPAKITNHLVAMIEKTISGQDALPNISDAERIFAELLTGLAAAQPGFPLAQLKTFVDQEFAQIKHVLHGISLLGQCPDSINAALICRGEKMSIAIMAGVLEARGHNVTVIDPVEKLLAVGHYLESTVDIAESTRRIAASRIPADHMVLMAGFTAGNEKGELVVLGRNGSDYSAAVLAACLRADCCEIWTDVDGVYTCDPRQVPDARLLKSMSYQEAMELSYFGAKVLHPRTITPIAQFQIPCLIKNTGNPQAPGTLIGASRDEDELPVKGISNLNNMAMFSVSGPGMKGMVGMAARVFAAMSRARISVVLITQSSSEYSISFCVPQSDCVRAERAMQEEFYLELKEGLLEPLAVTERLAIISVVGDGMRTLRGISAKFFAALARANINIVAIAQGSSERSISVVVNNDDATTGVRVTHQMLFNTDQVIEVFVIGVGGVGGALLEQLKRQQSWLKNKHIDLRVCGVANSKALLTNVHGLNLENWQEELAQAKEPFNLGRLIRLVKEYHLLNPVIVDCTSSQAVADQYADFLREGFHVVTPNKKANTSSMDYYHQLRYAAEKSRRKFLYDTNVGAGLPVIENLQNLLNAGDELMKFSGILSGSLSYIFGKLDEGMSFSEATTLAREMGYTEPDPRDDLSGMDVARKLLILARETGRELELADIEIEPVLPAEFNAEGDVAAFMANLSQLDDLFAARVAKARDEGKVLRYVNIDEDGVCRVKIAEVDGNDPLFKVKNGENALAFYSHYYQPLPLVLRGYGAGNDVTAAGVFADLLRTLSWKLGV

SEQ ID NO: 238 - protein, 819 aa, Escherichia coli
MRVLKFGGTSVANAERFLRVADILESNARQGQVATVLSAPAKITNHLVAMIEKTISGQDALPNISDAERIFAELLTGLAAAQPGFPLAQLKTFVDQEFAQIKHVLHGISLLGQCPDSINAALICRGEKMSIAIMAGVLEARGHNVTVIDPVEKLLAVGHYLESTVDIAESTRRIAASRIPADHMVLMAGFTAGNEKGELVVLGRNGSDYSAAVLAACLRADCCEIWTDVDGVYTCDPRQVPDARLLKSMSYQEAMELSYFGAKVLHPRTITPIAQFQIPCLIKNTGNPQAPGTLIGASRDEDELPVKGISNLNNMAMFSVSGPGMKGMVGMAARVFAAMSRARISVVLITQSSSEYSISFCVPQSDCVRAERAMQEEFYLELKEGLLEPLAVTERLAIISVVGDGMRTLRGISAKFFAALARANINIVAIAQGSSERSISVVVNNDDATTGVRVTHQMLFNTDQVIEVFVIGVGGVGGALLEQLKRQQSWLKNKHIDLRVCGVANSKALLTNVHGLNLENWQEELAQAKEPFNLGRLIRLVKEYHLLNPVIVDCTSSQAVADQYADFLREGFHVVTPNKKANTSSMDYYHQLRYAAEKSRRKFLYDTNVGAGLPVIENLQNLLNAGDELMKFSGILSGSLSYIFGKLDEGMSFSEATTLAREGYTEPDPRDDLSGMDVARKLLILARETGRELELADIEIEPVLPAEFNAEGDVAAFMANLSQLDDLFAARVAKARDEGKVLRYVGNIDEDGVCRVKIAEVDGNDPLFKVKNGENALAFYSHYYQPLPLVLRGYGAGNDVTAAGVFADLLRTLSWKLGV

SEQ ID NO: 239 - protein, 819 aa, Escherichia coli
MRVLKFGGTSVANAERFLRVADILESNARQGQVATVLSAPAKITNHLVAMIEKTISGQDALPNISDAERIFAELLTGLAAAQPGFPLAQLKTFVDQEFAQIKHVLHGISLLGQCPDSINAALICRGEKMSIAIMAGVLEARGHNVTVIDPVEKLLAVGHYLESTVDIAESTRRIAASRIPADHMVLMAGFTAGNEKGELVVLGRNGSDYSAAVLAACLRADCCEIWTDVDGVYTCDPRQVPDARLLKSMSYQEAMELSYFGAKVLHPRTITPIAQFQIPCLIKNTGNPQAPGTLIGASRDEDELPVKGISNLNNMAMFSVSGPGMKGMVGMAARVFAAMSRARISVVLITQSSSEYSISFCVPQSDCVRAERAMQEEFYLELKEGLLEPLAVTERLAIISVVGDGMRTLRGISAKFFAALARANINIVAIAQGSSERSISVVVNNDDATTGVRVTHQMLFNTDQVIEVFVIGVGGVGGALLEQLKRQQSWLKNKHIDLRVCGVANSKALLTNVHGLNLENWQEELAQAKEPFNLGRLIRLVKEYHLLNPVIVDCTSSQAVADQYADFLREGFHVVTPNKKANTSSMDYYHQLRYAAEKSRRKFLYDTNVGAGLPVIENLQNLLNAGDELMKFSGILSGSLSYIFGKLDEGMSFSEATTLAREMGYTEPDPRDDLSGMDVARKLLILARETGRELELADIEIEPVLPAEFNAEGDVAAFMANLSQLDDLFAARVAKARDEGKVLRYGNIDEDGVCRVKIAEVDGNDPLFKVKNGENALAFYSHYYQPLPLVLRGYGAGNDVTAAGVFADLLRTLSWKLGV

SEQ ID NO: 240 - protein, 819 aa, Escherichia coli
MRVLKFGGTSVANAERFLRVADILESNARQGQVATVLSAPAKITNHLVAMIEKTISGQDALPNISDAERIFAELLTGLAAAQPGFPLAQLKTFVDQEFAQIKHVLHGISLLGQCPDSINAALICRGEKMSIAIMAGVLEARGHNVTVIDPVEKLLAVGHYLESTVDIAESTRRIAASRIPADHMVLMAGFTAGNEKGELVVLGRNGSDYSAAVLAACLRADCCEIWTDVDGVYTCDPRQVPDARLLKSMSYQEAMELSYFGAKVLHPRTITPIAQFQIPCLIKNTGNPQAPGTLIGASRDEDELPVKGISNLNNMAMFSVSGPGMKGMVGMAARVFAAMSRARISVVLITQSSSEYSISFCVPQSDCVRAERAMQEEFYLELKEGLLEPLAVTERLAIISVVGDGMRTLRGISAKFFAALARANINIVAIAQGSSERSISVVVNNDDATTGVRVTHQMLFNTDQVIEVFVIGVGGVGGALLEQLKRQQSWLKNKHIDLRVCGVANSKALLTNVHGLNLENWQEELAQAKEPFNLGRLIRLVKEYHLLNPVIVDCTSSQAVADQYADFLREGFHVVTPNKKANTSSMDYYHQLRYAAEKSRRKFLYDTNVGAGLPVIENLQNLLNAGDELMKFSGILSGSLSYIFGKLDEGMSFSEATTLAREMGYTEPDPRDDLSGMDVARKLLILARETGRELELADIEIEPVLPAEFNAEGDVAAFMANLSQLDDLFARVAKARDEGKVLRYVGNIDEDGVCRVKIAEVDGNDPLFKVKNGENALAFYSHYYQPLPLVLRGYGAGNDVTAAGVFADLLRTLSWKLGV

SEQ ID NO: 241 - protein, 819 aa, Escherichia coli; identical to SEQ ID NO: 240

SEQ ID NO: 242 - protein, 819 aa, Escherichia coli
MRVLKFGGTSVANAERFLRVADILESNARQGQVATVLSAPAKITNHLVAMIEKTISGQDALPNISDAERIFAELLTGLAAAQPGFPLAQLKTFVDQEFAQIKHVLHGISLLGQCPDSINAALICRGEKMSIAIMAGVLEARGHNVTVIDPVEKLLAVGHYLESTVDIAESTRRIAASRIPADHMVLMAGFTAGNEKGELVVLGRNGSDYSAAVLAACLRADCCEIWTDVDGVYTCDPRQVPDARLLKSMSYQEAMELSYFGAKVLHPRTITPIAQFQIPCLIKNTGNPQAPGTLIGASRDEDELPVKGISNLNNMAMFSVSGPGMKGMVGMAARVFAAMSRARISVVLITQSSSEYSISFCVPQSDCVRAERAMQEEFYLELKEGLLEPLAVTERLAIISVVGDGMRTLRGISAKFFAALARANINIVAIAQGSSERSISVVVNNDDATTGVRVTHQMLFNTDQVIEVFVIGVGGVGGALLEQLKRQQSWLKNKHIDLRVCGVANSKALLTNVHGLNLENWQEELAQAKEPFNLGRLIRLVKEYHLLNPVIVDCTSSQAVADQADFLREGFHVVTPNKKANTSSMDYYHQLRYAAEKSRRKFLYDTNVGAGLPVIENLQNLLNAGDELMKFSGILSGSLSYIFGKLDEGMSFSEATTLAREMGYTEPDPRDDLSGMDVARKLLILARETGRELELADIEIEPVLPAEFNAEGDVAAFMANLSQLDDLFAARVAKARDEGKVLRYVGNIDEDGVCRVKIAEVDGNDPLFKVKNGENALAFYSHYYQPLPLVLRGYGAGNDVTAAGVFADLLRTLSWKLGV

SEQ ID NO: 243 - protein, 819 aa, Escherichia coli
MRVLKFGGTSVANAERFLRVADILESNARQGQVATVLSAPAKITNHLVAMIEKTISGQDALPNISDAERIFAELLTGLAAAQPGFPLAQLKTFVDQEFAQIKHVLHGISLLGQCPDSINAALICRGEKMSIAIMAGVLEARGHNVTVIDPVEKLLAVGHYLESTVDIAESTRRIAASRIPADHMVLMAGFTAGNEKGELVVLGRNGSDYSAAVLAACLRADCCEIWTDVDGVYTCDPRQVPDARLLKSMSYQEAMELSYFGAKVLHPRTITPIAQFQIPCLIKNTGNPQAPGTLIGASRDEDELPVKGISNLNNMAMFSVSGPGMKGMVGMAARVFAAMSRARISVVLITQSSSEYSISFCVPQSDCVRAERAMQEEFYLELKEGLLEPLAVTERLAIISVVGDGMRTLRGISAKFFAALARANINIVAIAQGSSERSISVVVNNDDATTGVRVTHQMLFNTDQVIEVFVIGVGGVGGALLEQLKRQQSWLKNKHIDLRVCGVANSKALLTNVHGLNLENWQEELAQAKEPFNLGRLIRLVKEYHLLNPVIVDCTSSQAVADQYADFLREGFHVVTPNKKANTSSMDYYHQLRYAAEKSRRKFLYDTNVGAGLPVIENLQNLLNAGDELMKFSGILSGSLSYIFGKLDEGMSFSEATTLAREMGYTEPDPRDDLSGMDVARKLLILARETGRELELADIEIEPVLPAEFNAEGDVAAFMANLSQLDDLFAARVAKARDEGKVLRYVGNIDEDGVCRVKIAEVDGNDPLFKVKNGENALAFYSHYYQPLPLVLRGYGAGNDVTAAGVFADLRTLSWKLGV

SEQ ID NO: 244 - protein, 819 aa, Escherichia coli
MRVLKFGGTSVANAERFLRVADILESNARQGQVATVLSAPAKITNHLVAMIEKTISGQDALPNISDAERIFAELLTGLAAAQPGFPLAQLKTFVDQEFAQIKHVLHGISLLGQCPDSINAALICRGEKMSIAIMAGVLEARGHNVTVIDPVEKLLAVGHYLESTVDIAESTRRIAASRIPADHMVLMAGFTAGNEKGELVVLGRNGSDYSAAVLAACLRADCCEIWTDVDGVYTCDPRQVPDARLLKSMSYQEAMELSYFGAKVLHPRTITPIAQFQIPCLIKNTGNPQAPGTLIGASRDEDELPVKGISNLNNMAMFSVSGPGMKGMVGMAARVFAAMSRARISVVLITQSSSEYSISFCVPQSDCVRAERAMQEEFYLELKEGLLEPLAVTERLAIISVVGDGMRTLRGISAKFFAALARANINIVAIAQGSSERSISVVVNNDDATTGVRVTHQMLFNTDQVIEVFVIGVGGVGGALLEQLKRQQSWLKNKHIDLRVCGVANSKALLTNVHGLNLENWQEELAQAKEPFNLGRLIRLVKEYHLLNPVIVDCTSSQAVADQYADFLREGFHVVTPNKKANTSSMDYYHQLRYAAEKSRRKFLYDTNVGAGLPVIENLQNLLNAGDELMKFSGILSGSLSYIFGKLDEGMSFSEATTLAREMGYTEPDPRDDLSGMDVARKLLILARETGRELELADIEIEPVLPAEFNAEGDVAAFMANLSQLDDLFAARVAKARDEGKVLRYVGNIDEDGVCRVKIAEVDGNDPLFKVKNGENALAFYSHYYQPLPLVLRGYGAGNDVTAAGVFADLLTLSWKLGV

SEQ ID NO: 245 - protein, 819 aa, Escherichia coli
MRVLKFGGTSVANAERFLRVADILESNARQGQVATVLSAPAKITNHLVAMIEKTISGQDALPNISDAERIFAELLTGLAAAQPGFPLAQLKTFVDQEFAQIKHVLHGISLLGQCPDSINAALICRGEKMSIAIMAGVLEARGHNVTVIDPVEKLLAVGHYLESTVDIAESTRRIAASRIPADHMVLMAGFTAGNEKGELVVLGRNGSDYSAAVLAACLRADCCEIWTDVDGVYTCDPRQVPDARLLKSMSYQEAMELSYFGAKVLHPRTITPIAQFQIPCLIKNTGNPQAPGTLIGASRDEDELPVKGISNLNNMAMFSVSGPGMKGMVGMAARVFAAMSRARISVVLITQSSSEYSISFCVPQSDCVRAERAMQEEFYLELKEGLLEPLAVTERLAIISVVGDGMRTLRGISAKFFAALARANINIVAIAQGSSERSISVVVNNDDATTGVRVTHQMLFNTDQVIEVFVIGVGGVGGALLEQLKRQQSWLKNKHIDLRVCGVANSKALLTNVHGLNLENWQEELAQAKEPFNLGRLIRLVKEYHLLNPVIVDCTSSQAVADQYADFLREGFHVVTPNKKANTSSMDYYHQLRYAAEKSRRKFLYDTNVGAGLPVIENLQNLLNAGDELMKFSGILSGSLSYIFGKLDEGMSFSEATTLAREMGYTEPDPRDDLSGMDVARKLLILARETGRELELADIEIEPVLPAEFNAEGDVAAFMANLSQLDDLFAARVAKARDEGKVLRYVGNIDEDGCRVKIAEVDGNDPLFKVKNGENALAFYSHYYQPLPLVLRGYGAGNDVTAAGVFADLLRTLSWKLGV

SEQ ID NO: 246 - protein, 819 aa, Escherichia coli
MRVLKFGGTSVANAERFLRVADILESNARQGQVATVLSAPAKITNHLVAMIEKTISGQDALPNISDAERIFAELLTGLAAAQPGFPLAQLKTFVDQEFAQIKHVLHGISLLGQCPDSINAALICRGEKMSIAIMAGVLEARGHNVTVIDPVEKLLAVGHYLESTVDIAESTRRIAASRIPADHMVLMAGFTAGNEKGELVVLGRNGSDYSAAVLAACLRADCCEIWTDVDGVYTCDPRQVPDARLLKSMSYQEAMELSYFGAKVLHPRTITPIAQFQIPCLIKNTGNPQAPGTLIGASRDEDELPVKGISNLNNMAMFSVSGPGMKGMVGMAARVFAAMSRARISVVLITQSSSEYSISFCVPQSDCVRAERAMQEEFYLELKEGLLEPLAVTERLAIISVVGDGMRTLRGISAKFFAALARANINIVAIAQGSSERSISVVVNNDDATTGVRVTHQMLFNTDQVIEVFVIGVGGVGGALLEQLKRQQSWLKNKHIDLRVCGVANSKALLTNVHGLNLENWQEELAQAKEPFNLGRLIRLVKEYHLLNPVIVDCTSSQAVADQYADFLREGFHVVTPNKKANTSSMDYYHQLRYAAEKSRRKFLYDTNVGAGLPVIENLQNLLNAGDELMKFSILSGSLSYIFGKLDEGMSFSEATTLAREMGYTEPDPRDDLSGMDVARKLLILARETGRELELADIEIEPVLPAEFNAEGDVAAFMANLSQLDDLFAARVAKARDEGKVLRYVGNIDEDGVCRVKIAEVDGNDPLFKVKNGENALAFYSHYYQPLPLVLRGYGAGNDVTAAGVFADLLRTLSWKLGV

SEQ ID NO: 247 - protein, 819 aa, Escherichia coli
MRVLKFGGTSVANAERFLRVADILESNARQGQVATVLSAPAKITNHLVAMIEKTISGQDALPNISDAERIFAELLTGLAAAQPGFPLAQLKTFVDQEFAQIKHVLHGISLLGQCPDSINAALICRGEKMSIAIMAGVLEARGHNVTVIDPVEKLLAVGHYLESTVDIAESTRRIAASRIPADHMVLMAGFTAGNEKGELVVLGRNGSDYSAAVLAACLRADCCEIWTDVDGVYTCDPRQVPDARLLKSMSYQEAMELSYFGAKVLHPRTITPIAQFQIPCLIKNTGNPQAPGTLIGASRDEDELPVKGISNLNNMAMFSVSGPGMKGMVGMAARVFAAMSRARISVVLITQSSSEYSISFCVPQSDCVRAERAMQEEFYLELKEGLLEPLAVTERLAIISVVGDGMRTLRGISAKFFAALARANINIVAIAQGSSERSISVVVNNDDATTGVRVTHQMLFNTDQVIEVFVIGVGGVGGALLEQLKRQSWLKNKHIDLRVCGVANSKALLTNVHGLNLENWQEELAQAKEPFNLGRLIRLVKEYHLLNPVIVDCTSSQAVADQYADFLREGFHVVTPNKKANTSSMDYYHQLRYAAEKSRRKFLYDTNVGAGLPVIENLQNLLNAGDELMKFSGILSGSLSYIFGKLDEGMSFSEATTLAREMGYTEPDPRDDLSGMDVARKLLILARETGRELELADIEIEPVLPAEFNAEGDVAAFMANLSQLDDLFAARVAKARDEGKVLRYVGNIDEDGVCRVKIAEVDGNDPLFKVKNGENALAFYSHYYQPLPLVLRGYGAGNDVTAAGVFADLLRTLSWKLGV

SEQ ID NO: 248 - protein, 819 aa, Escherichia coli
MRVLKFGGTSVANAERFLRVADILESNARQGQVATVLSAPAKITNHLVAMIEKTISGQDALPNISDAERIFAELLTGLAAAQPGFPLAQLKTFVDQEFAQIKHVLHGISLLGQCPDSINAALICRGEKMSIAIMAGVLEARGHNVTVIDPVEKLLAVGHYLESTVDIAESTRRIAASRIPADHMVLMAGFTAGNEKGELVVLGRNGSDYSAAVLAACLRADCCEIWTDVDGVYTCDPRQVPDARLLKSMSYQEAMELSYFGAKVLHPRTITPIAQFQIPCLIKNTGNPQAPGTLIGASRDEDELPVKGISNLNNMAMFSVSGPGMKGMVGMAARVFAAMSRARISVVLITQSSSEYSISFCVPQSDCVRAERAMQEEFYLELKEGLLEPLAVTERLAIISVVGDGMRTLRGISAKFFAALARANINIVAIAQGSSERSISVVVNNDDATTGVRVTHQMLFNTDQVIEVFVIGVGGVGGALEQLKRQQSWLKNKHIDLRVCGVANSKALLTNVHGLNLENWQEELAQAKEPFNLGRLIRLVKEYHLLNPVIVDCTSSQAVADQYADFLREGFHVVTPNKKANTSSMDYYHQLRYAAEKSRRKFLYDTNVGAGLPVIENLQNLLNAGDELMKFSGILSGSLSYIFGKLDEGMSFSEATTLAREMGYTEPDPRDDLSGMDVARKLLILARETGRELELADIEIEPVLPAEFNAEGDVAAFMANLSQLDDLFAARVAKARDEGKVLRYVGNIDEDGVCRVKIAEVDGNDPLFKVKNGENALAFYSHYYQPLPLVLRGYGAGNDVTAAGVFADLLRTLSWKLGV

SEQ ID NO: 249 - protein, 819 aa, Escherichia coli
MRVLKFGGTSVANAERFLRVADILESNARQGQVATVLSAPAKITNHLVAMIEKTISGQDALPNISDAERIFAELLTGLAAAQPGFPLAQLKTFVDQEFAQIKHVLHGISLLGQCPDSINAALICRGEKMSIAIMAGVLEARGHNVTVIDPVEKLLAVGHYLESTVDIAESTRRIAASRIPADHMVLMAGFTAGNEKGELVVLGRNGSDYSAAVLAACLRADCCEIWTDVDGVYTCDPRQVPDARLLKSMSYQEAMELSYFGAKVLHPRTITPIAQFQIPCLIKNTGNPQAPGTLIGASRDEDELPVKGISNLNNMAMFSVSGPGMKGMVGMAARVFAAMSRARISVVLITQSSSEYSISFCVPQSDCVRAERAMQEEFYLELKEGLLEPLAVTERLAIISVVGDGMRTLRGISAKFFAALARANINIVAIAQGSSERSISVVVNNDDATTGVRVTHQMLFNTDQVIEVFVIGVGGVGGALLEQLKRQQSWLKNKHIDLRVCGVANSKALLTNVHGLNLENWQEELAQAKEPFNLGRLIRLVKEYHLLNPVIVDCTSSQAVADQYADFLREGFHVVTPNKKANTSSMDYYHQLRYAAEKSRRKFLYDTNVGAGLPVIENLQNLLNAGDELMKFSGILGSLSYIFGKLDEGMSFSEATTLAREMGYTEPDPRDDLSGMDVARKLLILARETGRELELADIEIEPVLPAEFNAEGDVAAFMANLSQLDDLFAARVAKARDEGKVLRYVGNIDEDGVCRVKIAEVDGNDPLFKVKNGENALAFYSHYYQPLPLVLRGYGAGNDVTAAGVFADLLRTLSWKLGV

SEQ ID NO: 250 - protein, 819 aa, Escherichia coli
MRVLKFGGTSVANAERFLRVADILESNARQGQVATVLSAPAKITNHLVAMIEKTISGQDALPNISDAERIFAELLTGLAAAQPGFPLAQLKTFVDQEFAQIKHVLHGISLLGQCPDSINAALICRGEKMSIAIMAGVLEARGHNVTVIDPVEKLLAVGHYLESTVDIAESTRRIAASRIPADHMVLMAGFTAGNEKGELVVLGRNGSDYSAAVLAACLRADCCEIWTDVDGVYTCDPRQVPDARLLKSMSYQEAMELSYFGAKVLHPRTITPIAQFQIPCLIKNTGNPQAPGTLIGASRDEDELPVKGISNLNNMAMFSVSGPGMKGMVGMAARVFAAMSRARISVVLITQSSSEYSISFCVPQSDCVRAERAMQEEFYLELKEGLLEPLAVTERLAIISVVGDGMRTLRGISAKFFAALARANINIVAIAQGSSERSISVVVNNDDATTGVRVTHQMLFNTDQVIEVFVIGVGGVGGALLEQLKRQQSWLKNKHIDLRVCGVANSKALLTNVHGLNLENWQEELAQAKEPFNLGRLIRLVKEYHLLNPVIVDCTSSQAVADQYDFLREGFHVVTPNKKANTSSMDYYHQLRYAAEKSRRKFLYDTNVGAGLPVIENLQNLLNAGDELMKFSGILSGSLSYIFGKLDEGMSFSEATTLAREMGYTEPDPRDDLSGMDVARKLLILARETGRELELADIEIEPVLPAEFNAEGDVAAFMANLSQLDDLFAARVAKARDEGKVLRYVGNIDEDGVCRVKIAEVDGNDPLFKVKNGENALAFYSHYYQPLPLVLRGYGAGNDVTAAGVFADLLRTLSWKLGV

SEQ ID NO: 251 - protein, 819 aa, Escherichia coli
MRVLKFGGTSVANAERFLRVADILESNARQGQVATVLSAPAKITNHLVAMIEKTISGQDALPNISDAERIFAELLTGLAAAQPGFPLAQLKTFVDQEFAQIKHVLHGISLLGQCPDSINAALICRGEKMSIAIMAGVLEARGHNVTVIDPVEKLLAVGHYLESTVDIAESTRRIAASRIPADHMVLMAGFTAGNEKGELVVLGRNGSDYSAAVLAACLRADCCEIWTDVDGVYTCDPRQVPDARLLKSMSYQEAMELSYFGAKVLHPRTITPIAQFQIPCLIKNTGNPQAPGTLIGASRDEDELPVKGISNLNNMAMFSVSGPGMKGMVGMAARVFAAMSRARISVVLITQSSSEYSISFCVPQSDCVRAERAMQEEFYLELKEGLLEPLAVTERLAIISVVGDGMRTLRGISAKFFAALARANINIVAIAQGSSERSISVVVNNDDATTGVRVTHQMLFNTDQVIEVFVIGVGGVGGALLEQLKRQQSWLKNKHIDLRCGVANSKALLTNVHGLNLENWQEELAQAKEPFNLGRLIRLVKEYHLLNPVIVDCTSSQAVADQYADFLREGFHVVTPNKKANTSSMDYYHQLRYAAEKSRRKFLYDTNVGAGLPVIENLQNLLNAGDELMKFSGILSGSLSYIFGKLDEGMSFSEATTLAREMGYTEPDPRDDLSGMDVARKLLILARETGRELELADIEIEPVLPAEFNAEGDVAAFMANLSQLDDLFAARVAKARDEGKVLRYVGNIDEDGVCRVKIAEVDGNDPLFKVKNGENALAFYSHYYQPLPLVLRGYGAGNDVTAAGVFADLLRTLSWKLGV

SEQ ID NO: 252 - protein, 819 aa, Escherichia coli
MRVLKFGGTSVANAERFLRVADILESNARQGQVATVLSAPAKITNHLVAMIEKTISGQDALPNISDAERIFAELLTGLAAAQPGFPLAQLKTFVDQEFAQIKHVLHGISLLGQCPDSINAALICRGEKMSIAIMAGVLEARGHNVTVIDPVEKLLAVGHYLESTVDIAESTRRIAASRIPADHMVLMAGFTAGNEKGELVVLGRNGSDYSAAVLAACLRADCCEIWTDVDGVYTCDPRQVPDARLLKSMSYQEAMELSYFGAKVLHPRTITPIAQFQIPCLIKNTGNPQAPGTLIGASRDEDELPVKGISNLNNMAMFSVSGPGMKGMVGMAARVFAAMSRARISVVLITQSSSEYSISFCVPQSDCVRAERAMQEEFYLELKEGLLEPLAVTERLAIISVVGDGMRTLRGISAKFFAALARANINIVAIAQGSSERSISVVVNNDDATTGVRVTHQMLFNTDQVIEVFVIGVGGVGGALLEQLKRQQSWLKNKHIDLRVCGVANSKALLTNVHGLNLENWQEELAQAKEPFNLGRLIRLVKEYHLLNPVIVDCTSSQAVADQYADFLREGFHVVTPNKKANTSSMDYYHQLRYAAESRRKFLYDTNVGAGLPVIENLQNLLNAGDELMKFSGILSGSLSYIFGKLDEGMSFSEATTLAREMGYTEPDPRDDLSGMDVARKLLILARETGRELELADIEIEPVLPAEFNAEGDVAAFMANLSQLDDLFAARVAKARDEGKVLRYVGNIDEDGVCRVKIAEVDGNDPLFKVKNGENALAFYSHYYQPLPLVLRGYGAGNDVTAAGVFADLLRTLSWKLGV

SEQ ID NO: 253 - protein, 819 aa, Escherichia coli
MRVLKFGGTSVANAERFLRVADILESNARQGQVATVLSAPAKITNHLVAMIEKTISGQDALPNISDAERIFAELLTGLAAAQPGFPLAQLKTFVDQEFAQIKHVLHGISLLGQCPDSINAALICRGEKMSIAIMAGVLEARGHNVTVIDPVEKLLAVGHYLESTVDIAESTRRIAASRIPADHMVLMAGFTAGNEKGELVVLGRNGSDYSAAVLAACLRADCCEIWTDVDGVYTCDPRQVPDARLLKSMSYQEAMELSYFGAKVLHPRTITPIAQFQIPCLIKNTGNPQAPGTLIGASRDEDELPVKGISNLNNMAMFSVSGPGMKGMVGMAARVFAAMSRARISVVLITQSSSEYSISFCVPQSDCVRAERAMQEEFYLELKEGLLEPLAVTERLAIISVVGDGMRTLRGISAKFFAALARANINIVAIAQGSSERSISVVVNNDDATTGVRVTHQMLFNTDQVIEVFVIGVGGVGGALLEQLKRQQSWLKNKHIDLRVCGVANSALLTNVHGLNLENWQEELAQAKEPFNLGRLIRLVKEYHLLNPVIVDCTSSQAVADQYADFLREGFHVVTPNKKANTSSMDYYHQLRYAAEKSRRKFLYDTNVGAGLPVIENLQNLLNAGDELMKFSGILSGSLSYIFGKLDEGMSFSEATTLAREMGYTEPDPRDDLSGMDVARKLLILARETGRELELADIEIEPVLPAEFNAEGDVAAFMANLSQLDDLFAARVAKARDEGKVLRYVGNIDEDGVCRVKIAEVDGNDPLFKVKNGENALAFYSHYYQPLPLVLRGYGAGNDVTAAGVFADLLRTLSWKLGV

SEQ ID NO: 254 - protein, 819 aa, Escherichia coli
MRVLKFGGTSVANAERFLRVADILESNARQGQVATVLSAPAKITNHLVAMIEKTISGQDALPNISDAERIFAELLTGLAAAQPGFPLAQLKTFVDQEFAQIKHVLHGISLLGQCPDSINAALICRGEKMSIAIMAGVLEARGHNVTVIDPVEKLLAVGHYLESTVDIAESTRRIAASRIPADHMVLMAGFTAGNEKGELVVLGRNGSDYSAAVLAACLRADCCEIWTDVDGVYTCDPRQVPDARLLKSMSYQEAMELSYFGAKVLHPRTITPIAQFQIPCLIKNTGNPQAPGTLIGASRDEDELPVKGISNLNNMAMFSVSGPGMKGMVGMAARVFAAMSRARISVVLITQSSSEYSISFCVPQSDCVRAERAMQEEFYLELKEGLLEPLAVTERLAIISVVGDGMRTLRGISAKFFAALARANINIVAIAQGSSERSISVVVNNDDATTGVRVTHQMLFNTDQVIEVFVIGVGGVGGALLEQLKRQQSWLKNKHIDLRVCGVANSKALLTNVHGLNLENWQEELAQAKEPFNLGRLIRLVKEYHLLNPVIVDCTSSQAVADQYADFLREGFHVVTPNKKANTSSMDYYHQLRYAAEKSRRKFLYDTNVGAGLPVIENLQNLLNAGDELMKFSGILSGSLSYIFGKLDEGMSFSEATTLAREMGYTEPDPRDDLSGMDVARKLLILARETGRELELADIEIEPVLPAEFAEGDVAAFMANLSQLDDLFAARVAKARDEGKVLRYVGNIDEDGVCRVKIAEVDGNDPLFKVKNGENALAFYSHYYQPLPLVLRGYGAGNDVTAAGVFADLLRTLSWKLGV

SEQ ID NO: 255 - protein, 819 aa, Escherichia coli
MRVLKFGGTSVANAERFLRVADILESNARQGQVATVLSAPAKITNHLVAMIEKTISGQDALPNISDAERIFAELLTGLAAAQPGFPLAQLKTFVDQEFAQIKHVLHGISLLGQCPDSINAALICRGEKMSIAIMAGVLEARGHNVTVIDPVEKLLAVGHYLESTVDIAESTRRIAASRIPADHMVLMAGFTAGNEKGELVVLGRNGSDYSAAVLAACLRADCCEIWTDVDGVYTCDPRQVPDARLLKSMSYQEAMELSYFGAKVLHPRTITPIAQFQIPCLIKNTGNPQAPGTLIGASRDEDELPVKGISNLNNMAMFSVSGPGMKGMVGMAARVFAAMSRARISVVLITQSSSEYSISFCVPQSDCVRAERAMQEEFYLELKEGLLEPLAVTERLAIISVVGDGMRTLRGISAKFFAALARANINIVAIAQGSSERSISVVVNNDDATTGVRVTHQMLFNTDQVIEVFVIGVGGVGGALLEQLKRQQSWLKNKHIDLRVCGVANSKALLTNVHGLNLENWQEELAQAKEPFNLGRLIRLVKEYHLLNPVIVDCTSSQAVADQYADFLREGFHVVTPNKKANTSSMDYYHQLRYAAEKSRRKFLYDTNVGAGLPVIENLQNLLNAGDELMKFSGILSGSLSYIFGKLDEGMSFSEATTLAREMGYTEPDPRDDLSGMDVARKLLILARETGRELELADIEIEPVLPAEFNAEGDVAAFMANLSQLDDFAARVAKARDEGKVLRYVGNIDEDGVCRVKIAEVDGNDPLFKVKNGENALAFYSHYYQPLPLVLRGYGAGNDVTAAGVFADLLRTLSWKLGV

SEQ ID NO: 256 - protein, 819 aa, Escherichia coli
MRVLKFGGTSVANAERFLRVADILESNARQGQVATVLSAPAKITNHLVAMIEKTISGQDALPNISDAERIFAELLTGLAAAQPGFPLAQLKTFVDQEFAQIKHVLHGISLLGQCPDSINAALICRGEKMSIAIMAGVLEARGHNVTVIDPVEKLLAVGHYLESTVDIAESTRRIAASRIPADHMVLMAGFTAGNEKGELVVLGRNGSDYSAAVLAACLRADCCEIWTDVDGVYTCDPRQVPDARLLKSMSYQEAMELSYFGAKVLHPRTITPIAQFQIPCLIKNTGNPQAPGTLIGASRDEDELPVKGISNLNNMAMFSVSGPGMKGMVGMAARVFAAMSRARISVVLITQSSSEYSISFCVPQSDCVRAERAMQEEFYLELKEGLLEPLAVTERLAIISVVGDGMRTLRGISAKFFAALARANINIVAIAQGSSERSISVVVNNDDATTGVRVTHQMLNTDQVIEVFVIGVGGVGGALLEQLKRQQSWLKNKHIDLRVCGVANSKALLTNVHGLNLENWQEELAQAKEPFNLGRLIRLVKEYHLLNPVIVDCTSSQAVADQYADFLREGFHVVTPNKKANTSSMDYYHQLRYAAEKSRRKFLYDTNVGAGLPVIENLQNLLNAGDELMKFSGILSGSLSYIFGKLDEGMSFSEATTLAREMGYTEPDPRDDLSGMDVARKLLILARETGRELELADIEIEPVLPAEFNAEGDVAAFMANLSQLDDLFAARVAKARDEGKVLRYVGNIDEDGVCRVKIAEVDGNDPLFKVKNGENALAFYSHYYQPLPLVLRGYGAGNDVTAAGVFADLLRTLSWKLGV

SEQ ID NO: 257 - protein, 819 aa, Escherichia coli; identical to SEQ ID NO: 224

SEQ ID NO: 258 - protein, 819 aa, Escherichia coli
MRVLKFGGTSVANAERFLRVADILESNARQGQVATVLSAPAKITNHLVAMIEKTISGQDALPNISDAERIFAELLTGLAAAQPGFPLAQLKTFVDQEFAQIKHVLHGISLLGQCPDSINAALICRGEKMSIAIMAGVLEARGHNVTVIDPVEKLLAVGHYLESTVDIAESTRRIAASRIPADHMVLMAGFTAGNEKGELVVLGRNGSDYSAAVLAACLRADCCEIWTDVDGVYTCDPRQVPDARLLKSMSYQEAMELSYFGAKVLHPRTITPIAQFQIPCLIKNTGNPQAPGTLIGASRDEDELPVKGISNLNNMAMFSVSGPGMKGMVGMAARVFAAMSRARISVVLITQSSSEYSISFCVPQSDCVRAERAMQEEFYLELKEGLLEPLAVTERLAIISVVGDGMRTLRGISAKFFAALARANINIVAIAQGSSERSISVVVNNDDATTGVRVTHQMLFNTDQVIEVFVIGVGGVGGALLEQLKRQQSWLKNKHIDLRVCGVANSKALLTNVHGLNLENWQEELAQAKEPFNLGRLIRLVKEYHLLNPVIVDCTSSQAVADQYADFLREGFHVVTPNKKANTSSMDYYHQLRYAAEKSRRKFLYDTNVGAGLPVIENLQNLLNAGDELMKFSGILSGSLSYIFGKLDEGMSFSEATTLAREMGYTEPDPRDDLSGMDVARKLLILARETGRELELADIEIEPVLPAEFNAEGDAAFMANLSQLDDLFAARVAKARDEGKVLRYVGNIDEDGVCRVKIAEVDGNDPLFKVKNGENALAFYSHYYQPLPLVLRGYGAGNDVTAAGVFADLLRTLSWKLGV

SEQ ID NO: 259 - protein, 819 aa, Escherichia coli
MRVLKFGGTSVANAERFLRVADILESNARQGQVATVLSAPAKITNHLVAMIEKTISGQDALPNISDAERIFAELLTGLAAAQPGFPLAQLKTFVDQEFAQIKHVLHGISLLGQCPDSINAALICRGEKMSIAIMAGVLEARGHNVTVIDPVEKLLAVGHYLESTVDIAESTRRIAASRIPADHMVLMAGFTAGNEKGELVVLGRNGSDYSAAVLAACLRADCCEIWTDVDGVYTCDPRQVPDARLLKSMSYQEAMELSYFGAKVLHPRTITPIAQFQIPCLIKNTGNPQAPGTLIGASRDEDELPVKGISNLNNMAMFSVSGPGMKGMVGMAARVFAAMSRARISVVLITQSSSEYSISFCVPQSDCVRAERAMQEEFYLELKEGLLEPLAVTERLAIISVVGDGMRTLRGISAKFFAALARANINIVAIAQGSSERSISVVVNNDDATTGVRVTHQMLFNTDQVIEVFVIGVGGVGGALLEQLKRQQSWLKNKHIDLRVCGVANSKALLTNVHGLNLENWQEELAQAKEPFNLGRLIRLVKEYHLLNPVIVDCTSSQAVADQYADFLREGFHVVTPNKKANTSSMDYYHQLRYAAEKSRRKFLYDTNVGAGLPVIENLQNLLNAGDELMKFSGILSGSLSYIFGKLDEGMSFSEATTLAREMGYTEPDPRDDLSGMDVARKLLILARETGRELELADIEIEPVLPAEFNAEGDVAAFMANLSQLDDLFAARVAKRDEGKVLRYVGNIDEDGVCRVKIAEVDGNDPLFKVKNGENALAFYSHYYQPLPLVLRGYGAGNDVTAAGVFADLLRTLSWKLGV

SEQ ID NO: 260 - protein, 819 aa, Escherichia coli
MRVLKFGGTSVANAERFLRVADILESNARQGQVATVLSAPAKITNHLVAMIEKTISGQDALPNISDAERIFAELLTGLAAAQPGFPLAQLKTFVDQEFAQIKHVLHGISLLGQCPDSINAALICRGEKMSIAIMAGVLEARGHNVTVIDPVEKLLAVGHYLESTVDIAESTRRIAASRIPADHMVLMAGFTAGNEKGELVVLGRNGSDYSAAVLAACLRADCCEIWTDVDGVYTCDPRQVPDARLLKSMSYQEAMELSYFGAKVLHPRTITPIAQFQIPCLIKNTGNPQAPGTLIGASRDEDELPVKGISNLNNMAMFSVSGPGMKGMVGMAARVFAAMSRARISVVLITQSSSEYSISFCVPQSDCVRAERAMQEEFYLELKEGLLEPLAVTERLAIISVVGDGMRTLRGISAKFFAALARANINIVAIAQGSSERSISVVVNNDDATTGVRVTHQMLFNTDQVIEVFVIGVGGVGGALLEQLKRQQSWLKNKHIDLRVCGVANSKALLTNVHGLNLENWQEELAQAKEPFNLGRLIRLVKEYHLLNPVIVDCTSSQAVADQYADFLREGFHVVTPNKKANTSSMDYYHQLRYAAEKSRRKFLYDTNVGAGLPVIENLQNLLNAGDELMKFSGILSGSLSYIGKLDEGMSFSEATTLAREMGYTEPDPRDDLSGMDVARKLLILARETGRELELADIEIEPVLPAEFNAEGDVAAFMANLSQLDDLFAARVAKARDEGKVLRYVGNIDEDGVCRVKIAEVDGNDPLFKVKNGENALAFYSHYYQPLPLVLRGYGAGNDVTAAGVFADLLRTLSWKLGV

SEQ ID NO: 261 - protein, 819 aa, Escherichia coli
MRVLKFGGTSVANAERFLRVADILESNARQGQVATVLSAPAKITNHLVAMIEKTISGQDALPNISDAERIFAELLTGLAAAQPGFPLAQLKTFVDQEFAQIKHVLHGISLLGQCPDSINAALICRGEKMSIAIMAGVLEARGHNVTVIDPVEKLLAVGHYLESTVDIAESTRRIAASRIPADHMVLMAGFTAGNEKGELVVLGRNGSDYSAAVLAACLRADCCEIWTDVDGVYTCDPRQVPDARLLKSMSYQEAMELSYFGAKVLHPRTITPIAQFQIPCLIKNTGNPQAPGTLIGASRDEDELPVKGISNLNNMAMFSVSGPGMKGMVGMAARVFAAMSRARISVVLITQSSSEYSISFCVPQSDCVRAERAMQEEFYLELKEGLLEPLAVTERLAIISVVGDGMRTLRGISAKFFAALARANINIVAIAQGSSERSISVVVNNDDATTGVRVTHQMLFNTDQVIEVFVIGVGGVGGALLEQLKRQQSWLKNKHIDLRVCGVANSKALLTNVHGLNLENWQEELAQAKEPFNLGRLIRLVKEYHLLNPVIVDCTSSQAVADQYADFLREGFHVVTPNKKANTSSMDYYHQLRYAAEKSRRKFLYDTNVGAGLPVIENLQNLLNAGDELMKFSGILSGSLSYIFGKLDEGMSFSEATTLARMGYTEPDPRDDLSGMDVARKLLILARETGRELELADIEIEPVLPAEFNAEGDVAAFMANLSQLDDLFAARVAKARDEGKVLRYVGNIDEDGVCRVKIAEVDGNDPLFKVKNGENALAFYSHYYQPLPLVLRGYGAGNDVTAAGVFADLLRTLSWKLGV

SEQ ID NO: 262 - protein, 819 aa, Escherichia coli
MRVLKFGGTSVANAERFLRVADILESNARQGQVATVLSAPAKITNHLVAMIEKTISGQDALPNISDAERIFAELLTGLAAAQPGFPLAQLKTFVDQEFAQIKHVLHGISLLGQCPDSINAALICRGEKMSIAIMAGVLEARGHNVTVIDPVEKLLAVGHYLESTVDIAESTRRIAASRIPADHMVLMAGFTAGNEKGELVVLGRNGSDYSAAVLAACLRADCCEIWTDVDGVYTCDPRQVPDARLLKSMSYQEAMELSYFGAKVLHPRTITPIAQFQIPCLIKNTGNPQAPGTLIGASRDEDELPVKGISNLNNMAMFSVSGPGMKGMVGMAARVFAAMSRARISVVLITQSSSEYSISFCVPQSDCVRAERAMQEEFYLELKEGLLEPLAVTERLAIISVVGDGMRTLRGISAKFFAALARANINIVAIAQGSSERSISVVVNNDDATTGVRVTHQMLFNTDQVIEVFVIGVGGVGGALLEQLKRQQSWLKNKHIDLRVCGVANSKALLTNVHGLNLENWQEELAQAKEPFNLGRLIRLVKEYHLLNPVIVDCTSSQAVADQYADFLREGFHVVTPNKKANTSSMDYYHQLRYAAEKSRRKFLYDTNVGAGLPVIENLQNLLNAGDELMKFSGILSGSLSYIFGKLDEGMSFSEATTLAREMGYTEPDPRDDLSGMDVARKLLILARETGRELELADIEIEPVLPAEFNAEGDVAAFMANLSQLDDLFAARVAKARDEKVLRYVGNIDEDGVCRVKIAEVDGNDPLFKVKNGENALAFYSHYYQPLPLVLRGYGAGNDVTAAGVFADLLRTLSWKLGV

SEQ ID NO: 263 - protein, 819 aa, Escherichia coli
MRVLKFGGTSVANAERFLRVADILESNARQGQVATVLSAPAKITNHLVAMIEKTISGQDALPNISDAERIFAELLTGLAAAQPGFPLAQLKTFVDQEFAQIKHVLHGISLLGQCPDSINAALICRGEKMSIAIMAGVLEARGHNVTVIDPVEKLLAVGHYLESTVDIAESTRRIAASRIPADHMVLMAGFTAGNEKGELVVLGRNGSDYSAAVLAACLRADCCEIWTDVDGVYTCDPRQVPDARLLKSMSYQEAMELSYFGAKVLHPRTITPIAQFQIPCLIKNTGNPQAPGTLIGASRDEDELPVKGISNLNNMAMFSVSGPGMKGMVGMAARVFAAMSRARISVVLITQSSSEYSISFCVPQSDCVRAERAMQEEFYLELKEGLLEPLAVTERLAIISVVGDGMRTLRGISAKFFAALARANINIVAIAQGSSERSISVVVNNDDATTGVRVTHQMLFNTDQVIEVFVIGVGGVGGALLEQLKRQQSWLKNKHIDLRVCGVANSKALLTNVHGLNLENWQEELAQAKEPFNLGRLIRLVKEYHLLNPVIVDCTSSQAVADQYADFLREGFHVVTPNKKANTSSMDYYHQLRYAAEKSRRKFLYDTNVGAGLPVIENLQNLLNAGDELMKFSGILSGSLSYIFGKLDEGMSFSEATTLAREMGYTEPDPRDDLSGMDVARKLLILARETGRELELADIEIEPVLPAEFNAEGDVAAFMANLSQDDLFAARVAKARDEGKVLRYVGNIDEDGVCRVKIAEVDGNDPLFKVKNGENALAFYSHYYQPLPLVLRGYGAGNDVTAAGVFADLLRTLSWKLGV

SEQ ID NO: 264 - protein, 819 aa, Escherichia coli
MRVLKFGGTSVANAERFLRVADILESNARQGQVATVLSAPAKITNHLVAMIEKTISGQDALPNISDAERIFAELLTGLAAAQPGFPLAQLKTFVDQEFAQIKHVLHGISLLGQCPDSINAALICRGEKMSIAIMAGVLEARGHNVTVIDPVEKLLAVGHYLESTVDIAESTRRIAASRIPADHMVLMAGFTAGNEKGELVVLGRNGSDYSAAVLAACLRADCCEIWTDVDGVYTCDPRQVPDARLLKSMSYQEAMELSYFGAKVLHPRTITPIAQFQIPCLIKNTGNPQAPGTLIGASRDEDELPVKGISNLNNMAMFSVSGPGMKGMVGMAARVFAAMSRARISVVLITQSSSEYSISFCVPQSDCVRAERAMQEEFYLELKEGLLEPLAVTERLAIISVVGDGMRTLRGISAKFFAALARANINIVAIAQGSSERSISVVVNNDDATTGVRVTHQMLFNTDQVIEVFVIGVGGVGGALLEQLKRQQSWLKNKHIDLRVCGVANSKALLTNVHGLNLENWQEELAQAKEPFNLGRLIRLVKEYHLLNPVIVDCTSSQAVADQYADFLREGFHVVTPNKKANTSSMDYYHQLRYAAEKSRRKFLYDTNVGAGLPVIENLQNLLNAGDELMKFSGILSGSLSYIFGKLDEGMSFSEATTLAREMGYTEPDPRDDLSGMDVARKLLILARETGRELELADIEIEPVLPAEFNAEGDVAAFMANLQLDDLFAARVAKARDEGKVLRYVGNIDEDGVCRVKIAEVDGNDPLFKVKNGENALAFYSHYYQPLPLVLRGYGAGNDVTAAGVFADLLRTLSWKLGV

SEQ ID NO: 265 - protein, 819 aa, Escherichia coli
MRVLKFGGTSVANAERFLRVADILESNARQGQVATVLSAPAKITNHLVAMIEKTISGQDALPNISDAERIFAELLTGLAAAQPGFPLAQLKTFVDQEFAQIKHVLHGISLLGQCPDSINAALICRGEKMSIAIMAGVLEARGHNVTVIDPVEKLLAVGHYLESTVDIAESTRRIAASRIPADHMVLMAGFTAGNEKGELVVLGRNGSDYSAAVLAACLRADCCEIWTDVDGVYTCDPRQVPDARLLKSMSYQEAMELSYFGAKVLHPRTITPIAQFQIPCLIKNTGNPQAPGTLIGASRDEDELPVKGISNLNNMAMFSVSGPGMKGMVGMAARVFAAMSRARISVVLITQSSSEYSISFCVPQSDCVRAERAMQEEFYLELKEGLLEPLAVTERLAIISVVGDGMRTLRGISAKFFAALARANINIVAIAQGSSERSISVVVNNDDATTGVRVTHQMLFNTDQVIEVFVIGVGGVGGALLEQLKRQQSWLKNKHIDLRVCGVANSKALLTNVHGLNLENWQEELAQAKEPFNLGRLIRLVKEYHLLNPVIVDCTSSQAVADQYADFLREGFHVVTPNKKANTSSMDYYHQLRYAAEKSRRKFLYDTNVGAGLPVIENLQNLLNAGDELMKFSGILSGSLSYIFGKLDEGMSFSEATTLAREMGYTEDPRDDLSGMDVARKLLILARETGRELELADIEIEPVLPAEFNAEGDVAAFMANLSQLDDLFAARVAKARDEGKVLRYVGNIDEDGVCRVKIAEVDGNDPLFKVKNGENALAFYSHYYQPLPLVLRGYGAGNDVTAAGVFADLLRTLSWKLGV

SEQ ID NO: 266 - protein, 819 aa, Escherichia coli
MRVLKFGGTSVANAERFLRVADILESNARQGQVATVLSAPAKITNHLVAMIEKTISGQDALPNISDAERIFAELLTGLAAAQPGFPLAQLKTFVDQEFAQIKHVLHGISLLGQCPDSINAALICRGEKMSIAIMAGVLEARGHNVTVIDPVEKLLAVGHYLESTVDIAESTRRIAASRIPADHMVLMAGFTAGNEKGELVVLGRNGSDYSAAVLAACLRADCCEIWTDVDGVYTCDPRQVPDARLLKSMSYQEAMELSYFGAKVLHPRTITPIAQFQIPCLIKNTGNPQAPGTLIGASRDEDELPVKGISNLNNMAMFSVSGPGMKGMVGMAARVFAAMSRARISVVLITQSSSEYSISFCVPQSDCVRAERAMQEEFYLELKEGLLEPLAVTERLAIISVVGDGMRTLRGISAKFFAALARANINIVAIAQGSSERSISVVVNNDDATTGVRVTHQMLFNTDQVIEVFVIGVGGVGGALLEQLKRQQSWLKNKHIDLRVCGVANSKALLTNVHGLNLENWQEELAQAKEPFNLGRLIRLVKEYHLLNPVIVDCTSSQAVADQYADFLREGFHVVTPNKKANTSSMDYYHQLRYAAEKSRRKFLYDTNVGAGLPVIENLQNLLNAGDELMKFSGILSGSLSYIFGKLDEGMSFSEATTLAREMGYTEPDPRDDLSGMDVARKLLILARETGELELADIEIEPVLPAEFNAEGDVAAFMANLSQLDDLFAARVAKARDEGKVLRYVGNIDEDGVCRVKIAEVDGNDPLFKVKNGENALAFYSHYYQPLPLVLRGYGAGNDVTAAGVFADLLRTLSWKLGV

SEQ ID NO: 267 - protein, 819 aa, Escherichia coli
MRVLKFGGTSVANAERFLRVADILESNARQGQVATVLSAPAKITNHLVAMIEKTISGQDALPNISDAERIFAELLTGLAAAQPGFPLAQLKTFVDQEFAQIKHVLHGISLLGQCPDSINAALICRGEKMSIAIMAGVLEARGHNVTVIDPVEKLLAVGHYLESTVDIAESTRRIAASRIPADHMVLMAGFTAGNEKGELVVLGRNGSDYSAAVLAACLRADCCEIWTDVDGVYTCDPRQVPDARLLKSMSYQEAMELSYFGAKVLHPRTITPIAQFQIPCLIKNTGNPQAPGTLIGASRDEDELPVKGISNLNNMAMFSVSGPGMKGMVGMAARVFAAMSRARISVVLITQSSSEYSISFCVPQSDCVRAERAMQEEFYLELKEGLLEPLAVTERLAIISVVGDGMRTLRGISAKFFAALARANINIVAIAQGSSERSISVVVNNDDATTGVRVTHQMLFNTDQVIEVFVIGVGGVGGALLEQLKRQQSWLKNKHIDLRVCGVANSKALLTNVHGLNLENWQEELAQAKEPFNLGRLIRLVKEYHLLNPVIVDCTSSQAVADQYADFLREGFHVVTPNKKANTSSMDYYHQLRYAAEKSRRKFLYDTNVAGLPVIENLQNLLNAGDELMKFSGILSGSLSYIFGKLDEGMSFSEATTLAREMGYTEPDPRDDLSGMDVARKLLILARETGRELELADIEIEPVLPAEFNAEGDVAAFMANLSQLDDLFAARVAKARDEGKVLRYVGNIDEDGVCRVKIAEVDGNDPLFKVKNGENALAFYSHYYQPLPLVLRGYGAGNDVTAAGVFADLLRTLSWKLGV

SEQ ID NO: 268 - protein, 819 aa, Escherichia coli
MRVLKFGGTSVANAERFLRVADILESNARQGQVATVLSAPAKITNHLVAMIEKTISGQDALPNISDAERIFAELLTGLAAAQPGFPLAQLKTFVDQEFAQIKHVLHGISLLGQCPDSINAALICRGEKMSIAIMAGVLEARGHNVTVIDPVEKLLAVGHYLESTVDIAESTRRIAASRIPADHMVLMAGFTAGNEKGELVVLGRNGSDYSAAVLAACLRADCCEIWTDVDGVYTCDPRQVPDARLLKSMSYQEAMELSYFGAKVLHPRTITPIAQFQIPCLIKNTGNPQAPGTLIGASRDEDELPVKGISNLNNMAMFSVSGPGMKGMVGMAARVFAAMSRARISVVLITQSSSEYSISFCVPQSDCVRAERAMQEEFYLELKEGLLEPLAVTERLAIISVVGDGMRTLRGISAKFFAALARANINIVAIAQGSSERSISVVVNNDDATTGVRVTHQMLFNTDQVIEVFVIGVGGVGGALLEQLKRQQSWLKNKHIDLRVCGVANSKALLTNVHGLNLENWQEELAQAKEPFNLGRLIRLVKEYHLLNPVIVDCTSSQAVADQYADFLREGFHVVTPNKKANTSSMDYYHQLRYAAEKSRRKFLYDTNVGAGLPVIENLQNLLNAGDELMFSGILSGSLSYIFGKLDEGMSFSEATTLAREMGYTEPDPRDDLSGMDVARKLLILARETGRELELADIEIEPVLPAEFNAEGDVAAFMANLSQLDDLFAARVAKARDEGKVLRYVGNIDEDGVCRVKIAEVDGNDPLFKVKNGENALAFYSHYYQPLPLVLRGYGAGNDVTAAGVFADLLRTLSWKLGV

SEQ ID NO: 269 - protein, 819 aa, Escherichia coli
MRVLKFGGTSVANAERFLRVADILESNARQGQVATVLSAPAKITNHLVAMIEKTISGQDALPNISDAERIFAELLTGLAAAQPGFPLAQLKTFVDQEFAQIKHVLHGISLLGQCPDSINAALICRGEKMSIAIMAGVLEARGHNVTVIDPVEKLLAVGHYLESTVDIAESTRRIAASRIPADHMVLMAGFTAGNEKGELVVLGRNGSDYSAAVLAACLRADCCEIWTDVDGVYTCDPRQVPDARLLKSMSYQEAMELSYFGAKVLHPRTITPIAQFQIPCLIKNTGNPQAPGTLIGASRDEDELPVKGISNLNNMAMFSVSGPGMKGMVGMAARVFAAMSRARISVVLITQSSSEYSISFCVPQSDCVRAERAMQEEFYLELKEGLLEPLAVTERLAIISVVGDGMRTLRGISAKFFAALARANINIVAIAQGSSERSISVVVNNDDATTGVRVTHQMLFNTDQVIEVFVIGVGGVGGALLEQLKRQQSWLKNKHIDLRVCGVANSKALLTNVHGLNLENWQEELAQAKEPFNLGRLIRLVKEYHLLNPVIVDCTSSQAVADQYADFLREGFHVVTPNKKANTSSMDYYHQLRYAAEKSRKFLYDTNVGAGLPVIENLQNLLNAGDELMKFSGILSGSLSYIFGKLDEGMSFSEATTLAREMGYTEPDPRDDLSGMDVARKLLILARETGRELELADIEIEPVLPAEFNAEGDVAAFMANLSQLDDLFAARVAKARDEGKVLRYVGNIDEDGVCRVKIAEVDGNDPLFKVKNGENALAFYSHYYQPLPLVLRGYGAGNDVTAAGVFADLLRTLSWKLGV

SEQ ID NO: 270 - protein, 819 aa, Escherichia coli
MRVLKFGGTSVANAERFLRVADILESNARQGQVATVLSAPAKITNHLVAMIEKTISGQDALPNISDAERIFAELLTGLAAAQPGFPLAQLKTFVDQEFAQIKHVLHGISLLGQCPDSINAALICRGEKMSIAIMAGVLEARGHNVTVIDPVEKLLAVGHYLESTVDIAESTRRIAASRIPADHMVLMAGFTAGNEKGELVVLGRNGSDYSAAVLAACLRADCCEIWTDVDGVYTCDPRQVPDARLLKSMSYQEAMELSYFGAKVLHPRTITPIAQFQIPCLIKNTGNPQAPGTLIGASRDEDELPVKGISNLNNMAMFSVSGPGMKGMVGMAARVFAAMSRARISVVLITQSSSEYSISFCVPQSDCVRAERAMQEEFYLELKEGLLEPLAVTERLAIISVVGDGMRTLRGISAKFFAALARANINIVAIAQGSSERSISVVVNNDDATTGVRVTHQMLFNTDQVIEVFVIGVGGVGGALLEQLKRQQSWLKNKHIDLRVCGVANSKALLTNVHGLNLENWQEELAQAKEPFNLGRLIRLVKEYHLLNPVIVDCTSSQAVADQYADFLREGHVVTPNKKANTSSMDYYHQLRYAAEKSRRKFLYDTNVGAGLPVIENLQNLLNAGDELMKFSGILSGSLSYIFGKLDEGMSFSEATTLAREMGYTEPDPRDDLSGMDVARKLLILARETGRELELADIEIEPVLPAEFNAEGDVAAFMANLSQLDDLFAARVAKARDEGKVLRYVGNIDEDGVCRVKIAEVDGNDPLFKVKNGENALAFYSHYYQPLPLVLRGYGAGNDVTAAGVFADLLRTLSWKLGV

SEQ ID NO: 271 - protein, 819 aa, Escherichia coli
MRVLKFGGTSVANAERFLRVADILESNARQGQVATVLSAPAKITNHLVAMIEKTISGQDALPNISDAERIFAELLTGLAAAQPGFPLAQLKTFVDQEFAQIKHVLHGISLLGQCPDSINAALICRGEKMSIAIMAGVLEARGHNVTVIDPVEKLLAVGHYLESTVDIAESTRRIAASRIPADHMVLMAGFTAGNEKGELVVLGRNGSDYSAAVLAACLRADCCEIWTDVDGVYTCDPRQVPDARLLKSMSYQEAMELSYFGAKVLHPRTITPIAQFQIPCLIKNTGNPQAPGTLIGASRDEDELPVKGISNLNNMAMFSVSGPGMKGMVGMAARVFAAMSRARISVVLITQSSSEYSISFCVPQSDCVRAERAMQEEFYLELKEGLLEPLAVTERLAIISVVGDGMRTLRGISAKFFAALARANINIVAIAQGSSERSISVVVNNDDATTGVRVTHQMLFNTDQVIEVFVIGVGGVGGALLEQLKRQQSWLKNKHIDLRVCGVANSKALLTNVHGLNLENWQEELAQAKEPFNLGRLIRLVKEYHLLNPVIVDCTSSQAVADQYADFLREGFHVVTPNKKANTSSMDYYHQLRYAAEKSRRKFLYDTNVGAGLPVIENLQNLLNAGDELMKFSGILSGSLSYIFGKLDEGMSFSEATTLAREMGYTEPDPRDDLSGMDVARKLLILARETGRELELADIEIEPVLPAEFNAEGDVAAFMALSQLDDLFAARVAKARDEGKVLRYVGNIDEDGVCRVKIAEVDGNDPLFKVKNGENALAFYSHYYQPLPLVLRGYGAGNDVTAAGVFADLLRTLSWKLGV

SEQ ID NO: 272 - protein, 819 aa, Escherichia coli
MRVLKFGGTSVANAERFLRVADILESNARQGQVATVLSAPAKITNHLVAMIEKTISGQDALPNISDAERIFAELLTGLAAAQPGFPLAQLKTFVDQEFAQIKHVLHGISLLGQCPDSINAALICRGEKMSIAIMAGVLEARGHNVTVIDPVEKLLAVGHYLESTVDIAESTRRIAASRIPADHMVLMAGFTAGNEKGELVVLGRNGSDYSAAVLAACLRADCCEIWTDVDGVYTCDPRQVPDARLLKSMSYQEAMELSYFGAKVLHPRTITPIAQFQIPCLIKNTGNPQAPGTLIGASRDEDELPVKGISNLNNMAMFSVSGPGMKGMVGMAARVFAAMSRARISVVLITQSSSEYSISFCVPQSDCVRAERAMQEEFYLELKEGLLEPLAVTERLAIISVVGDGMRTLRGISAKFFAALARANINIVAIAQGSSERSISVVVNNDDATTGVRVTHQMLFNTDQVIEVFVIGVGGVGGALLEQLKRQQSWLKNKHIDLRVCGVANSKALLTNVHGLNLENWQEELAQAKEFNLGRLIRLVKEYHLLNPVIVDCTSSQAVADQYADFLREGFHVVTPNKKANTSSMDYYHQLRYAAEKSRRKFLYDTNVGAGLPVIENLQNLLNAGDELMKFSGILSGSLSYIFGKLDEGMSFSEATTLAREMGYTEPDPRDDLSGMDVARKLLILARETGRELELADIEIEPVLPAEFNAEGDVAAFMANLSQLDDLFAARVAKARDEGKVLRYVGNIDEDGVCRVKIAEVDGNDPLFKVKNGENALAFYSHYYQPLPLVLRGYGAGNDVTAAGVFADLLRTLSWKLGV

SEQ ID NO: 273 - protein, 819 aa, Escherichia coli
MRVLKFGGTSVANAERFLRVADILESNARQGQVATVLSAPAKITNHLVAMIEKTISGQDALPNISDAERIFAELLTGLAAAQPGFPLAQLKTFVDQEFAQIKHVLHGISLLGQCPDSINAALICRGEKMSIAIMAGVLEARGHNVTVIDPVEKLLAVGHYLESTVDIAESTRRIAASRIPADHMVLMAGFTAGNEKGELVVLGRNGSDYSAAVLAACLRADCCEIWTDVDGVYTCDPRQVPDARLLKSMSYQEAMELSYFGAKVLHPRTITPIAQFQIPCLIKNTGNPQAPGTLIGASRDEDELPVKGISNLNNMAMFSVSGPGMKGMVGMAARVFAAMSRARISVVLITQSSSEYSISFCVPQSDCVRAERAMQEEFYLELKEGLLEPLAVTERLAIISVVGDGMRTLRGISAKFFAALARANINIVAIAQGSSERSISVVVNNDDATTGVRVTHQMLFNTDQVIEVFVIGVGGVGGALLEQLKRQQSWLKNKHIDLRVCGVANSKALLTNVHGLNLENQEELAQAKEPFNLGRLIRLVKEYHLLNPVIVDCTSSQAVADQYADFLREGFHVVTPNKKANTSSMDYYHQLRYAAEKSRRKFLYDTNVGAGLPVIENLQNLLNAGDELMKFSGILSGSLSYIFGKLDEGMSFSEATTLAREMGYTEPDPRDDLSGMDVARKLLILARETGRELELADIEIEPVLPAEFNAEGDVAAFMANLSQLDDLFAARVAKARDEGKVLRYVGNIDEDGVCRVKIAEVDGNDPLFKVKNGENALAFYSHYYQPLPLVLRGYGAGNDVTAAGVFADLLRTLSWKLGV

SEQ ID NO: 274 - protein, 819 aa, Escherichia coli
MRVLKFGGTSVANAERFLRVADILESNARQGQVATVLSAPAKITNHLVAMIEKTISGQDALPNISDAERIFAELLTGLAAAQPGFPLAQLKTFVDQEFAQIKHVLHGISLLGQCPDSINAALICRGEKMSIAIMAGVLEARGHNVTVIDPVEKLLAVGHYLESTVDIAESTRRIAASRIPADHMVLMAGFTAGNEKGELVVLGRNGSDYSAAVLAACLRADCCEIWTDVDGVYTCDPRQVPDARLLKSMSYQEAMELSYFGAKVLHPRTITPIAQFQIPCLIKNTGNPQAPGTLIGASRDEDELPVKGISNLNNMAMFSVSGPGMKGMVGMAARVFAAMSRARISVVLITQSSSEYSISFCVPQSDCVRAERAMQEEFYLELKEGLLEPLAVTERLAIISVVGDGMRTLRGISAKFFAALARANINIVAIAQGSSERSISVVVNNDDATTGVRVTHQMLFNTDQVIEVFVIGVGGVGGALLEQLKRQQSWLKNKHIDLRVCGVANSKALLTNVHGLNLENWQEELAQAKEPFNLGRLIRLVKEYHLLNPVIVDCTSSQAVADQYADFLREGFHVVTPNKKANTSSMDYYHQLRYAAEKSRRKFLYDTNVGAGLPVIENLQNLLNAGDELMKFSGILSGSLSYIFGKLDEGMSFSEATTLAREMGYTEPDPRDDLSGMDVARKLLILARETGRELELADIEIEPVLPAEFNEGDVAAFMANLSQLDDLFAARVAKARDEGKVLRYVGNIDEDGVCRVKIAEVDGNDPLFKVKNGENALAFYSHYYQPLPLVLRGYGAGNDVTAAGVFADLLRTLSWKLGV

SEQ ID NO: 275 - protein, 819 aa, Escherichia coli
MRVLKFGGTSVANAERFLRVADILESNARQGQVATVLSAPAKITNHLVAMIEKTISGQDALPNISDAERIFAELLTGLAAAQPGFPLAQLKTFVDQEFAQIKHVLHGISLLGQCPDSINAALICRGEKMSIAIMAGVLEARGHNVTVIDPVEKLLAVGHYLESTVDIAESTRRIAASRIPADHMVLMAGFTAGNEKGELVVLGRNGSDYSAAVLAACLRADCCEIWTDVDGVYTCDPRQVPDARLLKSMSYQEAMELSYFGAKVLHPRTITPIAQFQIPCLIKNTGNPQAPGTLIGASRDEDELPVKGISNLNNMAMFSVSGPGMKGMVGMAARVFAAMSRARISVVLITQSSSEYSISFCVPQSDCVRAERAMQEEFYLELKEGLLEPLAVTERLAIISVVGDGMRTLRGISAKFFAALARANINIVAIAQGSSERSISVVVNNDDATTGVRVTHQMLFNTDQVIEVFVIGVGGVGGALLEQLKRQQSWLKNKHIDLRVCGVANSKALLTNVHGLNLENWQEELAQAKEPFNLGRLIRLVKEYHLLNPVIVDCTSSQAVADQYADFLREGFHVVTPNKKANTSSMDYYHQLRYAAEKSRRKFLYDTNVGAGLPVIENLQNLLNAGDELMKFSGILSGSLSYIFGKLDEGMSFSEATTLAREMGYTEPDPRDDLSGMDVARKLLILARETGRELELADIEIEPVLPAEFNAEGDVAAFMANLSQLDDLFAARVAKADEGKVLRYVGNIDEDGVCRVKIAEVDGNDPLFKVKNGENALAFYSHYYQPLPLVLRGYGAGNDVTAAGVFADLLRTLSWKLGV

SEQ ID NO: 276 - protein, 819 aa, Escherichia coli
MRVLKFGGTSVANAERFLRVADILESNARQGQVATVLSAPAKITNHLVAMIEKTISGQDALPNISDAERIFAELLTGLAAAQPGFPLAQLKTFVDQEFAQIKHVLHGISLLGQCPDSINAALICRGEKMSIAIMAGVLEARGHNVTVIDPVEKLLAVGHYLESTVDIAESTRRIAASRIPADHMVLMAGFTAGNEKGELVVLGRNGSDYSAAVLAACLRADCCEIWTDVDGVYTCDPRQVPDARLLKSMSYQEAMELSYFGAKVLHPRTITPIAQFQIPCLIKNTGNPQAPGTLIGASRDEDELPVKGISNLNNMAMFSVSGPGMKGMVGMAARVFAAMSRARISVVLITQSSSEYSISFCVPQSDCVRAERAMQEEFYLELKEGLLEPLAVTERLAIISVVGDGMRTLRGISAKFFAALARANINIVAIAQGSSERSISVVVNNDDATTGVRVTHQMLFNTDQVIEVFVIGVGGVGGALLEQLKRQQSWLKNKHIDLRVCGVANSKALLTNVHGLNLENWQEELAQAKEPFNLGRLIRVKEYHLLNPVIVDCTSSQAVADQYADFLREGFHVVTPNKKANTSSMDYYHQLRYAAEKSRRKFLYDTNVGAGLPVIENLQNLLNAGDELMKFSGILSGSLSYIFGKLDEGMSFSEATTLAREMGYTEPDPRDDLSGMDVARKLLILARETGRELELADIEIEPVLPAEFNAEGDVAAFMANLSQLDDLFAARVAKARDEGKVLRYVGNIDEDGVCRVKIAEVDGNDPLFKVKNGENALAFYSHYYQPLPLVLRGYGAGNDVTAAGVFADLLRTLSWKLGV

SEQ ID NO: 277 - protein, 819 aa, Escherichia coli
MRVLKFGGTSVANAERFLRVADILESNARQGQVATVLSAPAKITNHLVAMIEKTISGQDALPNISDAERIFAELLTGLAAAQPGFPLAQLKTFVDQEFAQIKHVLHGISLLGQCPDSINAALICRGEKMSIAIMAGVLEARGHNVTVIDPVEKLLAVGHYLESTVDIAESTRRIAASRIPADHMVLMAGFTAGNEKGELVVLGRNGSDYSAAVLAACLRADCCEIWTDVDGVYTCDPRQVPDARLLKSMSYQEAMELSYFGAKVLHPRTITPIAQFQIPCLIKNTGNPQAPGTLIGASRDEDELPVKGISNLNNMAMFSVSGPGMKGMVGMAARVFAAMSRARISVVLITQSSSEYSISFCVPQSDCVRAERAMQEEFYLELKEGLLEPLAVTERLAIISVVGDGMRTLRGISAKFFAALARANINIVAIAQGSSERSISVVVNNDDATTGVRVTHQMLFNTQVIEVFVIGVGGVGGALLEQLKRQQSWLKNKHIDLRVCGVANSKALLTNVHGLNLENWQEELAQAKEPFNLGRLIRLVKEYHLLNPVIVDCTSSQAVADQYADFLREGFHVVTPNKKANTSSMDYYHQLRYAAEKSRRKFLYDTNVGAGLPVIENLQNLLNAGDELMKFSGILSGSLSYIFGKLDEGMSFSEATTLAREMGYTEPDPRDDLSGMDVARKLLILARETGRELELADIEIEPVLPAEFNAEGDVAAFMANLSQLDDLFAARVAKARDEGKVLRYVGNIDEDGVCRVKIAEVDGNDPLFKVKNGENALAFYSHYYQPLPLVLRGYGAGNDVTAAGVFADLLRTLSWKLGV

SEQ ID NO: 278 - protein, 819 aa, Escherichia coli
MRVLKFGGTSVANAERFLRVADILESNARQGQVATVLSAPAKITNHLVAMIEKTISGQDALPNISDAERIFAELLTGLAAAQPGFPLAQLKTFVDQEFAQIKHVLHGISLLGQCPDSINAALICRGEKMSIAIMAGVLEARGHNVTVIDPVEKLLAVGHYLESTVDIAESTRRIAASRIPADHMVLMAGFTAGNEKGELVVLGRNGSDYSAAVLAACLRADCCEIWTDVDGVYTCDPRQVPDARLLKSMSYQEAMELSYFGAKVLHPRTITPIAQFQIPCLIKNTGNPQAPGTLIGASRDEDELPVKGISNLNNMAMFSVSGPGMKGMVGMAARVFAAMSRARISVVLITQSSSEYSISFCVPQSDCVRAERAMQEEFYLELKEGLLEPLAVTERLAIISVVGDGMRTLRGISAKFFAALARANINIVAIAQGSSERSISVVVNNDDATTGVRVTHQMLFNTDQVEVFVIGVGGVGGALLEQLKRQQSWLKNKHIDLRVCGVANSKALLTNVHGLNLENWQEELAQAKEPFNLGRLIRLVKEYHLLNPVIVDCTSSQAVADQYADFLREGFHVVTPNKKANTSSMDYYHQLRYAAEKSRRKFLYDTNVGAGLPVIENLQNLLNAGDELMKFSGILSGSLSYIFGKLDEGMSFSEATTLAREMGYTEPDPRDDLSGMDVARKLLILARETGRELELADIEIEPVLPAEFNAEGDVAAFMANLSQLDDLFAARVAKARDEGKVLRYVGNIDEDGVCRVKIAEVDGNDPLFKVKNGENALAFYSHYYQPLPLVLRGYGAGNDVTAAGVFADLLRTLSWKLGV

SEQ ID NO: 279 - protein, 819 aa, Escherichia coli
MRVLKFGGTSVANAERFLRVADILESNARQGQVATVLSAPAKITNHLVAMIEKTISGQDALPNISDAERIFAELLTGLAAAQPGFPLAQLKTFVDQEFAQIKHVLHGISLLGQCPDSINAALICRGEKMSIAIMAGVLEARGHNVTVIDPVEKLLAVGHYLESTVDIAESTRRIAASRIPADHMVLMAGFTAGNEKGELVVLGRNGSDYSAAVLAACLRADCCEIWTDVDGVYTCDPRQVPDARLLKSMSYQEAMELSYFGAKVLHPRTITPIAQFQIPCLIKNTGNPQAPGTLIGASRDEDELPVKGISNLNNMAMFSVSGPGMKGMVGMAARVFAAMSRARISVVLITQSSSEYSISFCVPQSDCVRAERAMQEEFYLELKEGLLEPLAVTERLAIISVVGDGMRTLRGISAKFFAALARANINIVAIAQGSSERSISVVVNNDDATTGVRVTHQMLFNTDQVIEVFVIGVGGVGGALLEQLKRQQSWLKNKHIDLRVCGVANSKALLTNVHGLNLENWQEELAQAKEPFNLGRLIRLVKEYHLLNPVIVDCTSSQAVADQYADFLREGFHVVTPNKKANTSSMDYYHQLRYAAEKSRRKFLYDTNVGAGLPVIENLQNLLNAGDELMKFSGILSGSLSYIFGKLDEGMSFSEATTLAREMGYTEPDPRDDLSGMDVARKLLILARETGRELELADIEIEPVLPAEFNAEGDVAAFMANLSQLDDLFAARVAKARDEGKLRYVGNIDEDGVCRVKIAEVDGNDPLFKVKNGENALAFYSHYYQPLPLVLRGYGAGNDVTAAGVFADLLRTLSWKLGV

SEQ ID NO: 280 - protein, 819 aa, Escherichia coli
MRVLKFGGTSVANAERFLRVADILESNARQGQVATVLSAPAKITNHLVAMIEKTISGQDALPNISDAERIFAELLTGLAAAQPGFPLAQLKTFVDQEFAQIKHVLHGISLLGQCPDSINAALICRGEKMSIAIMAGVLEARGHNVTVIDPVEKLLAVGHYLESTVDIAESTRRIAASRIPADHMVLMAGFTAGNEKGELVVLGRNGSDYSAAVLAACLRADCCEIWTDVDGVYTCDPRQVPDARLLKSMSYQEAMELSYFGAKVLHPRTITPIAQFQIPCLIKNTGNPQAPGTLIGASRDEDELPVKGISNLNNMAMFSVSGPGMKGMVGMAARVFAAMSRARISVVLITQSSSEYSISFCVPQSDCVRAERAMQEEFYLELKEGLLEPLAVTERLAIISVVGDGMRTLRGISAKFFAALARANINIVAIAQGSSERSISVVVNNDDATTGVRVTHQMLFNTDQVIEVFVIGVGGVGGALLEQLKRQQSWLKNKHIDLRVCGVANSKALLTNVHGLNLENWQEELAQAKEPFNLGRLIRLVKEYHLLNPVIVDCTSSQAVADQYADFLREGFHVVTPNKKANTSSMDYYHQLRYAAEKSRRKFLYDTNVGAGLPVIENLQNLLNAGDELMKFSGILSGSLSYIFGKLDEGMSFSEATTLAREMGYTEPDPRDDLSGMDVARLLILARETGRELELADIEIEPVLPAEFNAEGDVAAFMANLSQLDDLFAARVAKARDEGKVLRYVGNIDEDGVCRVKIAEVDGNDPLFKVKNGENALAFYSHYYQPLPLVLRGYGAGNDVTAAGVFADLLRTLSWKLGV

SEQ ID NO: 281 - protein, 819 aa, Escherichia coli
MRVLKFGGTSVANAERFLRVADILESNARQGQVATVLSAPAKITNHLVAMIEKTISGQDALPNISDAERIFAELLTGLAAAQPGFPLAQLKTFVDQEFAQIKHVLHGISLLGQCPDSINAALICRGEKMSIAIMAGVLEARGHNVTVIDPVEKLLAVGHYLESTVDIAESTRRIAASRIPADHMVLMAGFTAGNEKGELVVLGRNGSDYSAAVLAACLRADCCEIWTDVDGVYTCDPRQVPDARLLKSMSYQEAMELSYFGAKVLHPRTITPIAQFQIPCLIKNTGNPQAPGTLIGASRDEDELPVKGISNLNNMAMFSVSGPGMKGMVGMAARVFAAMSRARISVVLITQSSSEYSISFCVPQSDCVRAERAMQEEFYLELKEGLLEPLAVTERLAIISVVGDGMRTLRGISAKFFAALARANINIVAIAQGSSERSISVVVNNDDATTGVRVTHQMLFNTDQVIVFVIGVGGVGGALLEQLKRQQSWLKNKHIDLRVCGVANSKALLTNVHGLNLENWQEELAQAKEPFNLGRLIRLVKEYHLLNPVIVDCTSSQAVADQYADFLREGFHVVTPNKKANTSSMDYYHQLRYAAEKSRRKFLYDTNVGAGLPVIENLQNLLNAGDELMKFSGILSGSLSYIFGKLDEGMSFSEATTLAREMGYTEPDPRDDLSGMDVARKLLILARETGRELELADIEIEPVLPAEFNAEGDVAAFMANLSQLDDLFAARVAKARDEGKVLRYVGNIDEDGVCRVKIAEVDGNDPLFKVKNGENALAFYSHYYQPLPLVLRGYGAGNDVTAAGVFADLLRTLSWKLGV

SEQ ID NO: 282 - protein, 819 aa, Escherichia coli
MRVLKFGGTSVANAERFLRVADILESNARQGQVATVLSAPAKITNHLVAMIEKTISGQDALPNISDAERIFAELLTGLAAAQPGFPLAQLKTFVDQEFAQIKHVLHGISLLGQCPDSINAALICRGEKMSIAIMAGVLEARGHNVTVIDPVEKLLAVGHYLESTVDIAESTRRIAASRIPADHMVLMAGFTAGNEKGELVVLGRNGSDYSAAVLAACLRADCCEIWTDVDGVYTCDPRQVPDARLLKSMSYQEAMELSYFGAKVLHPRTITPIAQFQIPCLIKNTGNPQAPGTLIGASRDEDELPVKGISNLNNMAMFSVSGPGMKGMVGMAARVFAAMSRARISVVLITQSSSEYSISFCVPQSDCVRAERAMQEEFYLELKEGLLEPLAVTERLAIISVVGDGMRTLRGISAKFFAALARANINIVAIAQGSSERSISVVVNNDDATTGVRVTHQMLFNTDQVIEVFVIGVGGVGGALLEQLKRQQSWLKNKHIDLRVCGVANSKALLTNVHGLNLENWQEELAQAKEPFNLGRLIRLVKEYHLLNPVIVDCTSSQAVADQYADFLREGFHVVTPNKKANTSSMDYYHQLRYAAEKSRRKFLYDTNVGAGLPVIENLQNLLNAGDELMKFSGILSGSLSYIFGKLDEGMSFSEATTLAREMGTEPDPRDDLSGMDVARKLLILARETGRELELADIEIEPVLPAEFNAEGDVAAFMANLSQLDDLFAARVAKARDEGKVLRYVGNIDEDGVCRVKIAEVDGNDPLFKVKNGENALAFYSHYYQPLPLVLRGYGAGNDVTAAGVFADLLRTLSWKLGV

SEQ ID NO: 283 - protein, 819 aa, Escherichia coli
MRVLKFGGTSVANAERFLRVADILESNARQGQVATVLSAPAKITNHLVAMIEKTISGQDALPNISDAERIFAELLTGLAAAQPGFPLAQLKTFVDQEFAQIKHVLHGISLLGQCPDSINAALICRGEKMSIAIMAGVLEARGHNVTVIDPVEKLLAVGHYLESTVDIAESTRRIAASRIPADHMVLMAGFTAGNEKGELVVLGRNGSDYSAAVLAACLRADCCEIWTDVDGVYTCDPRQVPDARLLKSMSYQEAMELSYFGAKVLHPRTITPIAQFQIPCLIKNTGNPQAPGTLIGASRDEDELPVKGISNLNNMAMFSVSGPGMKGMVGMAARVFAAMSRARISVVLITQSSSEYSISFCVPQSDCVRAERAMQEEFYLELKEGLLEPLAVTERLAIISVVGDGMRTLRGISAKFFAALARANINIVAIAQGSSERSISVVVNNDDATTGVRVTHQMLFNTDQVIEVFVIGVGGVGGALLEQLKRQQSWLKNKHIDLRVCGVANSKALLTNVHGLNLENWQEELAQAKEPFNLGRLIRLVKEYHLLNPVIVDCTSSQAVADQYADFLREGFHVVPNKKANTSSMDYYHQLRYAAEKSRRKFLYDTNVGAGLPVIENLQNLLNAGDELMKFSGILSGSLSYIFGKLDEGMSFSEATTLAREMGYTEPDPRDDLSGMDVARKLLILARETGRELELADIEIEPVLPAEFNAEGDVAAFMANLSQLDDLFAARVAKARDEGKVLRYVGNIDEDGVCRVKIAEVDGNDPLFKVKNGENALAFYSHYYQPLPLVLRGYGAGNDVTAAGVFADLLRTLSWKLGV

SEQ ID NO: 284 - protein, 819 aa, Escherichia coli; identical to SEQ ID NO: 193

SEQ ID NO: 285 - protein, 819 aa, Escherichia coli
MRVLKFGGTSVANAERFLRVADILESNARQGQVATVLSAPAKITNHLVAMIEKTISGQDALPNISDAERIFAELLTGLAAAQPGFPLAQLKTFVDQEFAQIKHVLHGISLLGQCPDSINAALICRGEKMSIAIMAGVLEARGHNVTVIDPVEKLLAVGHYLESTVDIAESTRRIAASRIPADHMVLMAGFTAGNEKGELVVLGRNGSDYSAAVLAACLRADCCEIWTDVDGVYTCDPRQVPDARLLKSMSYQEAMELSYFGAKVLHPRTITPIAQFQIPCLIKNTGNPQAPGTLIGASRDEDELPVKGISNLNNMAMFSVSGPGMKGMVGMAARVFAAMSRARISVVLITQSSSEYSISFCVPQSDCVRAERAMQEEFYLELKEGLLEPLAVTERLAIISVVGDGMRTLRGISAKFFAALARANINIVAIAQGSSERSISVVVNNDDATTGVRVTHQMLFNTDQVIEVFVIGVGGVGGALLEQLKRQQSWLKNKHIDLRVCVANSKALLTNVHGLNLENWQEELAQAKEPFNLGRLIRLVKEYHLLNPVIVDCTSSQAVADQYADFLREGFHVVTPNKKANTSSMDYYHQLRYAAEKSRRKFLYDTNVGAGLPVIENLQNLLNAGDELMKFSGILSGSLSYIFGKLDEGMSFSEATTLAREMGYTEPDPRDDLSGMDVARKLLILARETGRELELADIEIEPVLPAEFNAEGDVAAFMANLSQLDDLFAARVAKARDEGKVLRYVGNIDEDGVCRVKIAEVDGNDPLFKVKNGENALAFYSHYYQPLPLVLRGYGAGNDVTAAGVFADLLRTLSWKLGV

SEQ ID NO: 286 - protein, 819 aa, Escherichia coli; identical to SEQ ID NO: 209

SEQ ID NO: 287 - protein, 819 aa, Escherichia coli
MRVLKFGGTSVANAERFLRVADILESNARQGQVATVLSAPAKITNHLVAMIEKTISGQDALPNISDAERIFAELLTGLAAAQPGFPLAQLKTFVDQEFAQIKHVLHGISLLGQCPDSINAALICRGEKMSIAIMAGVLEARGHNVTVIDPVEKLLAVGHYLESTVDIAESTRRIAASRIPADHMVLMAGFTAGNEKGELVVLGRNGSDYSAAVLAACLRADCCEIWTDVDGVYTCDPRQVPDARLLKSMSYQEAMELSYFGAKVLHPRTITPIAQFQIPCLIKNTGNPQAPGTLIGASRDEDELPVKGISNLNNMAMFSVSGPGMKGMVGMAARVFAAMSRARISVVLITQSSSEYSISFCVPQSDCVRAERAMQEEFYLELKEGLLEPLAVTERLAIISVVGDGMRTLRGISAKFFAALARANINIVAIAQGSSERSISVVVNNDDATTGVRVTHQMLFNTDQVIEVFVIGVGGVGGALLEQLKRQQSWLKNKHIDLRVCGVANSKALLTNVHGLNLENWQEEAQAKEPFNLGRLIRLVKEYHLLNPVIVDCTSSQAVADQYADFLREGFHVVTPNKKANTSSMDYYHQLRYAAEKSRRKFLYDTNVGAGLPVIENLQNLLNAGDELMKFSGILSGSLSYIFGKLDEGMSFSEATTLAREMGYTEPDPRDDLSGMDVARKLLILARETGRELELADIEIEPVLPAEFNAEGDVAAFMANLSQLDDLFAARVAKARDEGKVLRYVGNIDEDGVCRVKIAEVDGNDPLFKVKNGENALAFYSHYYQPLPLVLRGYGAGNDVTAAGVFADLLRTLSWKLGV

SEQ ID NO: 288 - protein, 819 aa, Escherichia coli
MRVLKFGGTSVANAERFLRVADILESNARQGQVATVLSAPAKITNHLVAMIEKTISGQDALPNISDAERIFAELLTGLAAAQPGFPLAQLKTFVDQEFAQIKHVLHGISLLGQCPDSINAALICRGEKMSIAIMAGVLEARGHNVTVIDPVEKLLAVGHYLESTVDIAESTRRIAASRIPADHMVLMAGFTAGNEKGELVVLGRNGSDYSAAVLAACLRADCCEIWTDVDGVYTCDPRQVPDARLLKSMSYQEAMELSYFGAKVLHPRTITPIAQFQIPCLIKNTGNPQAPGTLIGASRDEDELPVKGISNLNNMAMFSVSGPGMKGMVGMAARVFAAMSRARISVVLITQSSSEYSISFCVPQSDCVRAERAMQEEFYLELKEGLLEPLAVTERLAIISVVGDGMRTLRGISAKFFAALARANINIVAIAQGSSERSISVVVNNDDATTGVRVTHQMLFNTDQVIEVFVIGVGGVGGALLEQLKRQQSWLKNKHIDLRVCGVANSKALLTNVHGLNLENWQEELAQAKEPFNLGRLIRLVKEYHLLNPVIVDCTSSQAVADQYADFLREGFHVVTPNKKANTSSMDYYHQLRYAAEKSRRKFLYDTNVGAGLPVIENLQNLLNAGDELMKFSGILSGSLSYIFGKLDEGMSFSEATTLAREMGYTEPDPRDDLSGMVARKLLILARETGRELELADIEIEPVLPAEFNAEGDVAAFMANLSQLDDLFAARVAKARDEGKVLRYVGNIDEDGVCRVKIAEVDGNDPLFKVKNGENALAFYSHYYQPLPLVLRGYGAGNDVTAAGVFADLLRTLSWKLGV

SEQ ID NO: 289 - protein, 819 aa, Escherichia coli
MRVLKFGGTSVANAERFLRVADILESNARQGQVATVLSAPAKITNHLVAMIEKTISGQDALPNISDAERIFAELLTGLAAAQPGFPLAQLKTFVDQEFAQIKHVLHGISLLGQCPDSINAALICRGEKMSIAIMAGVLEARGHNVTVIDPVEKLLAVGHYLESTVDIAESTRRIAASRIPADHMVLMAGFTAGNEKGELVVLGRNGSDYSAAVLAACLRADCCEIWTDVDGVYTCDPRQVPDARLLKSMSYQEAMELSYFGAKVLHPRTITPIAQFQIPCLIKNTGNPQAPGTLIGASRDEDELPVKGISNLNNMAMFSVSGPGMKGMVGMAARVFAAMSRARISVVLITQSSSEYSISFCVPQSDCVRAERAMQEEFYLELKEGLLEPLAVTERLAIISVVGDGMRTLRGISAKFFAALARANINIVAIAQGSSERSISVVVNNDDATTGVRVTHQMLFNTDQVIEVFVIGVGGVGGALLEQLKRQQSWLKNKHIDLRVCGVANSKALLTNVHGLNLENWQEELAQAKEPFNLGRLIRLVKEYHLLNPVIVDCTSSQAVADQYADFLREGFHVVTPNKKANTSSMDYYHQLRYAAEKSRRKFLYDTNVGAGLPVIENLQNLLNAGDELMKFSGILSGSLSYIFGKLDGMSFSEATTLAREMGYTEPDPRDDLSGMDVARKLLILARETGRELELADIEIEPVLPAEFNAEGDVAAFMANLSQLDDLFAARVAKARDEGKVLRYVGNIDEDGVCRVKIAEVDGNDPLFKVKNGENALAFYSHYYQPLPLVLRGYGAGNDVTAAGVFADLLRTLSWKLGV

SEQ ID NO: 290 - protein, 819 aa, Escherichia coli
MRVLKFGGTSVANAERFLRVADILESNARQGQVATVLSAPAKITNHLVAMIEKTISGQDALPNISDAERIFAELLTGLAAAQPGFPLAQLKTFVDQEFAQIKHVLHGISLLGQCPDSINAALICRGEKMSIAIMAGVLEARGHNVTVIDPVEKLLAVGHYLESTVDIAESTRRIAASRIPADHMVLMAGFTAGNEKGELVVLGRNGSDYSAAVLAACLRADCCEIWTDVDGVYTCDPRQVPDARLLKSMSYQEAMELSYFGAKVLHPRTITPIAQFQIPCLIKNTGNPQAPGTLIGASRDEDELPVKGISNLNNMAMFSVSGPGMKGMVGMAARVFAAMSRARISVVLITQSSSEYSISFCVPQSDCVRAERAMQEEFYLELKEGLLEPLAVTERLAIISVVGDGMRTLRGISAKFFAALARANINIVAIAQGSSERSISVVVNNDDATTGVRVTHQMLFNTDQVIEVFVIGVGGVGGALLEQLKRQQSWLKNKHIDLRVCGVANSKALLTNVHGLNLENWQEELAQAKEPFNLGRLIRLVKEYHLLNPVIVDCTSSQAVADQYADFLREGFHVVTPNKKANTSSMDYYHQLRYAAEKSRRKFLYDTNVGAGLPVIENLQNLLNAGDELMKFSGILSGSLSYIFGKLDEGMSFSEATTLAREMGYTEPDPRDDLSGMDVARKLLILARETGRELELADIEIEPVLPAEFNAEGDVAAFMANLSQLDDLFAARVAKARDEGVLRYVGNIDEDGVCRVKIAEVDGNDPLFKVKNGENALAFYSHYYQPLPLVLRGYGAGNDVTAAGVFADLLRTLSWKLGV

SEQ ID NO: 291 - protein, 819 aa, Escherichia coli
MRVLKFGGTSVANAERFLRVADILESNARQGQVATVLSAPAKITNHLVAMIEKTISGQDALPNISDAERIFAELLTGLAAAQPGFPLAQLKTFVDQEFAQIKHVLHGISLLGQCPDSINAALICRGEKMSIAIMAGVLEARGHNVTVIDPVEKLLAVGHYLESTVDIAESTRRIAASRIPADHMVLMAGFTAGNEKGELVVLGRNGSDYSAAVLAACLRADCCEIWTDVDGVYTCDPRQVPDARLLKSMSYQEAMELSYFGAKVLHPRTITPIAQFQIPCLIKNTGNPQAPGTLIGASRDEDELPVKGISNLNNMAMFSVSGPGMKGMVGMAARVFAAMSRARISVVLITQSSSEYSISFCVPQSDCVRAERAMQEEFYLELKEGLLEPLAVTERLAIISVVGDGMRTLRGISAKFFAALARANINIVAIAQGSSERSISVVVNNDDATTGVRVTHQMLFNTDQVIEVFVIGVGGVGGALLEQLKRQQSWLKNKHIDLRVCGVANSKALLTNVHGLNLENWQEELAQAKEPFNLGRLIRLVKEYHLLNPVIVDCTSSQAVADQYADFLREGFHVVTPNKKANTSSMDYYHQLRYAAEKSRRKFLYDTNVGAGLPVIENLQNLLNAGDELMKFSGILSGSLSYIFGKLDEGMSFSEATTLREMGYTEPDPRDDLSGMDVARKLLILARETGRELELADIEIEPVLPAEFNAEGDVAAFMANLSQLDDLFAARVAKARDEGKVLRYVGNIDEDGVCRVKIAEVDGNDPLFKVKNGENALAFYSHYYQPLPLVLRGYGAGNDVTAAGVFADLLRTLSWKLGV

SEQ ID NO: 292 - protein, 819 aa, Escherichia coli
MRVLKFGGTSVANAERFLRVADILESNARQGQVATVLSAPAKITNHLVAMIEKTISGQDALPNISDAERIFAELLTGLAAAQPGFPLAQLKTFVDQEFAQIKHVLHGISLLGQCPDSINAALICRGEKMSIAIMAGVLEARGHNVTVIDPVEKLLAVGHYLESTVDIAESTRRIAASRIPADHMVLMAGFTAGNEKGELVVLGRNGSDYSAAVLAACLRADCCEIWTDVDGVYTCDPRQVPDARLLKSMSYQEAMELSYFGAKVLHPRTITPIAQFQIPCLIKNTGNPQAPGTLIGASRDEDELPVKGISNLNNMAMFSVSGPGMKGMVGMAARVFAAMSRARISVVLITQSSSEYSISFCVPQSDCVRAERAMQEEFYLELKEGLLEPLAVTERLAIISVVGDGMRTLRGISAKFFAALARANINIVAIAQGSSERSISVVVNNDDATTGVRVTHQMLFNTDQVIEVFVIGVGGVGGALLEQLKRQQSWLKNKHIDLRVCGVANSKALLTNVHGLNLENWQEELAQAKEPFNLGRLIRLVKEYHLLNPVIVDCTSSQAVADQYADFLREGFHVVTPNKKANTSSMDYYHQLRYAAEKSRRKFYDTNVGAGLPVIENLQNLLNAGDELMKFSGILSGSLSYIFGKLDEGMSFSEATTLAREMGYTEPDPRDDLSGMDVARKLLILARETGRELELADIEIEPVLPAEFNAEGDVAAFMANLSQLDDLFAARVAKARDEGKVLRYVGNIDEDGVCRVKIAEVDGNDPLFKVKNGENALAFYSHYYQPLPLVLRGYGAGNDVTAAGVFADLLRTLSWKLGV

SEQ ID NO: 293 - protein, 819 aa, Escherichia coli
MRVLKFGGTSVANAERFLRVADILESNARQGQVATVLSAPAKITNHLVAMIEKTISGQDALPNISDAERIFAELLTGLAAAQPGFPLAQLKTFVDQEFAQIKHVLHGISLLGQCPDSINAALICRGEKMSIAIMAGVLEARGHNVTVIDPVEKLLAVGHYLESTVDIAESTRRIAASRIPADHMVLMAGFTAGNEKGELVVLGRNGSDYSAAVLAACLRADCCEIWTDVDGVYTCDPRQVPDARLLKSMSYQEAMELSYFGAKVLHPRTITPIAQFQIPCLIKNTGNPQAPGTLIGASRDEDELPVKGISNLNNMAMFSVSGPGMKGMVGMAARVFAAMSRARISVVLITQSSSEYSISFCVPQSDCVRAERAMQEEFYLELKEGLLEPLAVTERLAIISVVGDGMRTLRGISAKFFAALARANINIVAIAQGSSERSISVVVNNDDATTGVRVTHQMLFNTDQVIEVFVIGVGGVGGALLEQLKRQQSWLKNKHIDLRVCGVANSKALLTNVHGLNLENWQEELAQAKEPFNLGRLIRLVKEYHLLNPVIVDCTSSQAVADQYADFLREGFHVVTPNKKANTSSMDYYHQLRYAAEKSRRKFLYDTNVGAGLPVIENLQNLLNAGELMKFSGILSGSLSYIFGKLDEGMSFSEATTLAREMGYTEPDPRDDLSGMDVARKLLILARETGRELELADIEIEPVLPAEFNAEGDVAAFMANLSQLDDLFAARVAKARDEGKVLRYVGNIDEDGVCRVKIAEVDGNDPLFKVKNGENALAFYSHYYQPLPLVLRGYGAGNDVTAAGVFADLLRTLSWKLGV

SEQ ID NO: 294 - protein, 819 aa, Escherichia coli
MRVLKFGGTSVANAERFLRVADILESNARQGQVATVLSAPAKITNHLVAMIEKTISGQDALPNISDAERIFAELLTGLAAAQPGFPLAQLKTFVDQEFAQIKHVLHGISLLGQCPDSINAALICRGEKMSIAIMAGVLEARGHNVTVIDPVEKLLAVGHYLESTVDIAESTRRIAASRIPADHMVLMAGFTAGNEKGELVVLGRNGSDYSAAVLAACLRADCCEIWTDVDGVYTCDPRQVPDARLLKSMSYQEAMELSYFGAKVLHPRTITPIAQFQIPCLIKNTGNPQAPGTLIGASRDEDELPVKGISNLNNMAMFSVSGPGMKGMVGMAARVFAAMSRARISVVLITQSSSEYSISFCVPQSDCVRAERAMQEEFYLELKEGLLEPLAVTERLAIISVVGDGMRTLRGISAKFFAALARANINIVAIAQGSSERSISVVVNNDDATTGVRVTHQMLFNTDQVIEVFVIGVGGVGGALLEQLKRQQSWLKNKHIDLRVCGVANSKALLTNVHGLNLENWQEELAQAKEPFNLGRLIRLVKEYHLLNPVIVDCTSSQAVADQYADFLREGFHVVTPNKKATSSMDYYHQLRYAAEKSRRKFLYDTNVGAGLPVIENLQNLLNAGDELMKFSGILSGSLSYIFGKLDEGMSFSEATTLAREMGYTEPDPRDDLSGMDVARKLLILARETGRELELADIEIEPVLPAEFNAEGDVAAFMANLSQLDDLFAARVAKARDEGKVLRYVGNIDEDGVCRVKIAEVDGNDPLFKVKNGENALAFYSHYYQPLPLVLRGYGAGNDVTAAGVFADLLRTLSWKLGV

SEQ ID NO: 295 - protein, 819 aa, Escherichia coli
MRVLKFGGTSVANAERFLRVADILESNARQGQVATVLSAPAKITNHLVAMIEKTISGQDALPNISDAERIFAELLTGLAAAQPGFPLAQLKTFVDQEFAQIKHVLHGISLLGQCPDSINAALICRGEKMSIAIMAGVLEARGHNVTVIDPVEKLLAVGHYLESTVDIAESTRRIAASRIPADHMVLMAGFTAGNEKGELVVLGRNGSDYSAAVLAACLRADCCEIWTDVDGVYTCDPRQVPDARLLKSMSYQEAMELSYFGAKVLHPRTITPIAQFQIPCLIKNTGNPQAPGTLIGASRDEDELPVKGISNLNNMAMFSVSGPGMKGMVGMAARVFAAMSRARISVVLITQSSSEYSISFCVPQSDCVRAERAMQEEFYLELKEGLLEPLAVTERLAIISVVGDGMRTLRGISAKFFAALARANINIVAIAQGSSERSISVVVNNDDATTGVRVTHQMLFNTDQVIEVFVIGVGGVGGALLEQLKRQQSWLKNKHDLRVCGVANSKALLTNVHGLNLENWQEELAQAKEPFNLGRLIRLVKEYHLLNPVIVDCTSSQAVADQYADFLREGFHVVTPNKKANTSSMDYYHQLRYAAEKSRRKFLYDTNVGAGLPVIENLQNLLNAGDELMKFSGILSGSLSYIFGKLDEGMSFSEATTLAREMGYTEPDPRDDLSGMDVARKLLILARETGRELELADIEIEPVLPAEFNAEGDVAAFMANLSQLDDLFAARVAKARDEGKVLRYVGNIDEDGVCRVKIAEVDGNDPLFKVKNGENALAFYSHYYQPLPLVLRGYGAGNDVTAAGVFADLLRTLSWKLGV

SEQ ID NO: 296 - protein, 819 aa, Escherichia coli
MRVLKFGGTSVANAERFLRVADILESNARQGQVATVLSAPAKITNHLVAMIEKTISGQDALPNISDAERIFAELLTGLAAAQPGFPLAQLKTFVDQEFAQIKHVLHGISLLGQCPDSINAALICRGEKMSIAIMAGVLEARGHNVTVIDPVEKLLAVGHYLESTVDIAESTRRIAASRIPADHMVLMAGFTAGNEKGELVVLGRNGSDYSAAVLAACLRADCCEIWTDVDGVYTCDPRQVPDARLLKSMSYQEAMELSYFGAKVLHPRTITPIAQFQIPCLIKNTGNPQAPGTLIGASRDEDELPVKGISNLNNMAMFSVSGPGMKGMVGMAARVFAAMSRARISVVLITQSSSEYSISFCVPQSDCVRAERAMQEEFYLELKEGLLEPLAVTERLAIISVVGDGMRTLRGISAKFFAALARANINIVAIAQGSSERSISVVVNNDDATTGVRVTHQMLFNTDQVIEVFVIGVGGVGGALLEQLKRQQSWLKNKHIDLRVCGVANSKALLTNVGLNLENWQEELAQAKEPFNLGRLIRLVKEYHLLNPVIVDCTSSQAVADQYADFLREGFHVVTPNKKANTSSMDYYHQLRYAAEKSRRKFLYDTNVGAGLPVIENLQNLLNAGDELMKFSGILSGSLSYIFGKLDEGMSFSEATTLAREMGYTEPDPRDDLSGMDVARKLLILARETGRELELADIEIEPVLPAEFNAEGDVAAFMANLSQLDDLFAARVAKARDEGKVLRYVGNIDEDGVCRVKIAEVDGNDPLFKVKNGENALAFYSHYYQPLPLVLRGYGAGNDVTAAGVFADLLRTLSWKLGV

SEQ ID NO: 297 - protein, 819 aa, Escherichia coli
MRVLKFGGTSVANAERFLRVADILESNARQGQVATVLSAPAKITNHLVAMIEKTISGQDALPNISDAERIFAELLTGLAAAQPGFPLAQLKTFVDQEFAQIKHVLHGISLLGQCPDSINAALICRGEKMSIAIMAGVLEARGHNVTVIDPVEKLLAVGHYLESTVDIAESTRRIAASRIPADHMVLMAGFTAGNEKGELVVLGRNGSDYSAAVLAACLRADCCEIWTDVDGVYTCDPRQVPDARLLKSMSYQEAMELSYFGAKVLHPRTITPIAQFQIPCLIKNTGNPQAPGTLIGASRDEDELPVKGISNLNNMAMFSVSGPGMKGMVGMAARVFAAMSRARISVVLITQSSSEYSISFCVPQSDCVRAERAMQEEFYLELKEGLLEPLAVTERLAIISVVGDGMRTLRGISAKFFAALARANINIVAIAQGSSERSISVVVNNDDATTGVRVTHQMLFNTDQVIEVFVIGVGGVGGALLEQLKRQQSWLKNKHIDLRVCGVANSKALLTNVHGLNLENWQEELAQAKEPFNLGRLIRLVKEYHLLNPVIVDCTSSQAVADQYADFLREGFVVTPNKKANTSSMDYYHQLRYAAEKSRRKFLYDTNVGAGLPVIENLQNLLNAGDELMKFSGILSGSLSYIFGKLDEGMSFSEATTLAREMGYTEPDPRDDLSGMDVARKLLILARETGRELELADIEIEPVLPAEFNAEGDVAAFMANLSQLDDLFAARVAKARDEGKVLRYVGNIDEDGVCRVKIAEVDGNDPLFKVKNGENALAFYSHYYQPLPLVLRGYGAGNDVTAAGVFADLLRTLSWKLGV

SEQ ID NO: 298 - protein, 819 aa, Escherichia coli
MRVLKFGGTSVANAERFLRVADILESNARQGQVATVLSAPAKITNHLVAMIEKTISGQDALPNISDAERIFAELLTGLAAAQPGFPLAQLKTFVDQEFAQIKHVLHGISLLGQCPDSINAALICRGEKMSIAIMAGVLEARGHNVTVIDPVEKLLAVGHYLESTVDIAESTRRIAASRIPADHMVLMAGFTAGNEKGELVVLGRNGSDYSAAVLAACLRADCCEIWTDVDGVYTCDPRQVPDARLLKSMSYQEAMELSYFGAKVLHPRTITPIAQFQIPCLIKNTGNPQAPGTLIGASRDEDELPVKGISNLNNMAMFSVSGPGMKGMVGMAARVFAAMSRARISVVLITQSSSEYSISFCVPQSDCVRAERAMQEEFYLELKEGLLEPLAVTERLAIISVVGDGMRTLRGISAKFFAALARANINIVAIAQGSSERSISVVVNNDDATTGVRVTHQMLFNTDQVIEVFVIGVGGVGGALLEQLKRQQSWLKNKHIDLRVCGVANSKALLTNVHGLNLENWQEELAQAKEPFNLGRLIRLVKEYHLLNPVIVDCTSSQAVDQYADFLREGFHVVTPNKKANTSSMDYYHQLRYAAEKSRRKFLYDTNVGAGLPVIENLQNLLNAGDELMKFSGILSGSLSYIFGKLDEGMSFSEATTLAREMGYTEPDPRDDLSGMDVARKLLILARETGRELELADIEIEPVLPAEFNAEGDVAAFMANLSQLDDLFAARVAKARDEGKVLRYVGNIDEDGVCRVKIAEVDGNDPLFKVKNGENALAFYSHYYQPLPLVLRGYGAGNDVTAAGVFADLLRTLSWKLGV

SEQ ID NO: 299 - protein, 819 aa, Escherichia coli
MRVLKFGGTSVANAERFLRVADILESNARQGQVATVLSAPAKITNHLVAMIEKTISGQDALPNISDAERIFAELLTGLAAAQPGFPLAQLKTFVDQEFAQIKHVLHGISLLGQCPDSINAALICRGEKMSIAIMAGVLEARGHNVTVIDPVEKLLAVGHYLESTVDIAESTRRIAASRIPADHMVLMAGFTAGNEKGELVVLGRNGSDYSAAVLAACLRADCCEIWTDVDGVYTCDPRQVPDARLLKSMSYQEAMELSYFGAKVLHPRTITPIAQFQIPCLIKNTGNPQAPGTLIGASRDEDELPVKGISNLNNMAMFSVSGPGMKGMVGMAARVFAAMSRARISVVLITQSSSEYSISFCVPQSDCVRAERAMQEEFYLELKEGLLEPLAVTERLAIISVVGDGMRTLRGISAKFFAALARANINIVAIAQGSSERSISVVVNNDDATTGVRVTHQMLFNTDQVIEVFVIGVGGVGGALLEQLKRQQSWLKNKHIDLRVCGVANSKALLTNVHGLNLENWQEELAQAKEPFNLGRLIRLVKEYHLLNPVIVDCTSSQAVADQYADFLREGFHVVTPNKKANTSSMDYYQLRYAAEKSRRKFLYDTNVGAGLPVIENLQNLLNAGDELMKFSGILSGSLSYIFGKLDEGMSFSEATTLAREMGYTEPDPRDDLSGMDVARKLLILARETGRELELADIEIEPVLPAEFNAEGDVAAFMANLSQLDDLFAARVAKARDEGKVLRYVGNIDEDGVCRVKIAEVDGNDPLFKVKNGENALAFYSHYYQPLPLVLRGYGAGNDVTAAGVFADLLRTLSWKLGV

SEQ ID NO: 300 - protein, 819 aa, Escherichia coli
MRVLKFGGTSVANAERFLRVADILESNARQGQVATVLSAPAKITNHLVAMIEKTISGQDALPNISDAERIFAELLTGLAAAQPGFPLAQLKTFVDQEFAQIKHVLHGISLLGQCPDSINAALICRGEKMSIAIMAGVLEARGHNVTVIDPVEKLLAVGHYLESTVDIAESTRRIAASRIPADHMVLMAGFTAGNEKGELVVLGRNGSDYSAAVLAACLRADCCEIWTDVDGVYTCDPRQVPDARLLKSMSYQEAMELSYFGAKVLHPRTITPIAQFQIPCLIKNTGNPQAPGTLIGASRDEDELPVKGISNLNNMAMFSVSGPGMKGMVGMAARVFAAMSRARISVVLITQSSSEYSISFCVPQSDCVRAERAMQEEFYLELKEGLLEPLAVTERLAIISVVGDGMRTLRGISAKFFAALARANINIVAIAQGSSERSISVVVNNDDATTGVRVTHQMLFNTDQVIEVFVIGVGGVGGALLEQLKRQQSWLKNKHIDLRVCGVANSKALLTNVHGLNLENWQEELAQAKEPFNLGRLIRLVKEYHLLNPVIVDCTSSQAVADQYADFLREGFHVVTPNKKANTSSMDYYHQLRYAAEKSRRKFLYDTNVGAGLPVIENLQNLLNAGDELMKFSGILSGSLSYIFGKLDEGMSFSEATTLAREMGYTEPDPRDLSGMDVARKLLILARETGRELELADIEIEPVLPAEFNAEGDVAAFMANLSQLDDLFAARVAKARDEGKVLRYVGNIDEDGVCRVKIAEVDGNDPLFKVKNGENALAFYSHYYQPLPLVLRGYGAGNDVTAAGVFADLLRTLSWKLGV

SEQ ID NO: 301 - protein, 819 aa, Escherichia coli
MRVLKFGGTSVANAERFLRVADILESNARQGQVATVLSAPAKITNHLVAMIEKTISGQDALPNISDAERIFAELLTGLAAAQPGFPLAQLKTFVDQEFAQIKHVLHGISLLGQCPDSINAALICRGEKMSIAIMAGVLEARGHNVTVIDPVEKLLAVGHYLESTVDIAESTRRIAASRIPADHMVLMAGFTAGNEKGELVVLGRNGSDYSAAVLAACLRADCCEIWTDVDGVYTCDPRQVPDARLLKSMSYQEAMELSYFGAKVLHPRTITPIAQFQIPCLIKNTGNPQAPGTLIGASRDEDELPVKGISNLNNMAMFSVSGPGMKGMVGMAARVFAAMSRARISVVLITQSSSEYSISFCVPQSDCVRAERAMQEEFYLELKEGLLEPLAVTERLAIISVVGDGMRTLRGISAKFFAALARANINIVAIAQGSSERSISVVVNNDDATTGVRVTHQMLFNTDQVIEVFVIGVGGVGGALLEQLKRQQSWLKNKHIDLRVCGVANSKALLTNVHGLNLENWQEELAQAKEPFNLGRLIRLVKEYHLLNPVIVDCTSSQAVADQYADFLREGFHVVTPNKKANTSSMDYYHQLRYAAEKSRRKFLYDTNVGAGLPVIENLQNLLNAGDELMKFSGILSGSLSYIFGKLDEGMSFSEATTLAREMGYTEPDPRDDLSGMDVARKLLILARETGRELELADIEIEPVLPAEFNAEGDVAAFMANLSQLDDLFAARVAKARDEGKVLRYVGNIDEDGVCRVKIAEVDGNDPLFKVKNGEALAFYSHYYQPLPLVLRGYGAGNDVTAAGVFADLLRTLSWKLGV

SEQ ID NO: 302 - protein, 819 aa, Escherichia coli
MRVLKFGGTSVANAERFLRVADILESNARQGQVATVLSAPAKITNHLVAMIEKTISGQDALPNISDAERIFAELLTGLAAAQPGFPLAQLKTFVDQEFAQIKHVLHGISLLGQCPDSINAALICRGEKMSIAIMAGVLEARGHNVTVIDPVEKLLAVGHYLESTVDIAESTRRIAASRIPADHMVLMAGFTAGNEKGELVVLGRNGSDYSAAVLAACLRADCCEIWTDVDGVYTCDPRQVPDARLLKSMSYQEAMELSYFGAKVLHPRTITPIAQFQIPCLIKNTGNPQAPGTLIGASRDEDELPVKGISNLNNMAMFSVSGPGMKGMVGMAARVFAAMSRARISVVLITQSSSEYSISFCVPQSDCVRAERAMQEEFYLELKEGLLEPLAVTERLAIISVVGDGMRTLRGISAKFFAALARANINIVAIAQGSSERSISVVVNNDDATTGVRVTHQMLFNTDQVIEVFVIGVGGVGGALLEQLKRQQSWLKNKHIDLRVCGVANSKALLTNVHGLNLENWQEELAQAKEPFNLGRLIRLVKEYHLLNPVIVDCTSSQAVADQYADFLREGFHVVTPNKKANTSSMDYYHQLRYAAEKSRRKFLYDTNVGAGLPVIENLQNLLNAGDLMKFSGILSGSLSYIFGKLDEGMSFSEATTLAREMGYTEPDPRDDLSGMDVARKLLILARETGRELELADIEIEPVLPAEFNAEGDVAAFMANLSQLDDLFAARVAKARDEGKVLRYVGNIDEDGVCRVKIAEVDGNDPLFKVKNGENALAFYSHYYQPLPLVLRGYGAGNDVTAAGVFADLLRTLSWKLGV

SEQ ID NO: 303 - protein, 820 aa, Escherichia coli
MRVLKFGGTSVANAERFLRVADILESNARQGQVATVLSAPAKITNHLVAMIEKTISGQDALPNISDAERIFAELLTGLAAAQPGFPLAQLKTFVDQEFAQIKHVLHGISLLGQCPDSINAALICRGEKMSIAIMAGVLEARGHNVTVIDPVEKLLAVGHYLESTVDIAESTRRIAASRIPADHMVLMAGFTAGNEKGELVVLGRNGSDYSAAVLAACLRADCCEIWTDVDGVYTCDPRQVPDARLLKSMSYQEAMELSYFGAKVLHPRTITPIAQFQIPCLIKNTGNPQAPGTLIGASRDEDELPVKGISNLNNMAMFSVSGPGMKGMVGMAARVFAAMSRARISVVLITQSSSEYSISFCVPQSDCVRAERAMQEEFYLELKEGLLEPLAVTERLAIISVVGDGMRTLRGISAKFFAALARANINIVAIAQGSSERSISVVVNNDDATTGVRVTHQMLFNTDQVIEVFVIGVGGVGGALLEQLKRQQSWLKNKHIDLRVCGVANSKALLTNVHGLNLENWQEELAQAKEPFNLGRLIRLVKEYHLLNPVIVDCTSSQAVADQYADFLREGFHVVTPNKKANTSSMDYYHQLRYAAEKSRRKFLYDTNVGAGLPVIENLQNLLNAGDELMKFSKILSGSLSYIFGKLDEGMSFSEATTLAREMGYTEPDPRDDLSGMDVARKLLILARETGRELELADIEIEPVLPAEFNAEGDVAAFMANLSQLDDLFAARVAKARDEGKVLRYVGNIDEDGVCRVKIAEVDGNDPLFKVKNGENALAFYSHYYQPLPLVLRGYGAGNDVTAAGVFADLLRTLSWKLGV

SEQ ID NO: 304 - protein, 820 aa, Escherichia coli
MRVLKFGGTSVANAERFLRVADILESNARQGQVATVLSAPAKITNHLVAMIEKTISGQDALPNISDAERIFAELLTGLAAAQPGFPLAQLKTFVDQEFAQIKHVLHGISLLGQCPDSINAALICRGEKMSIAIMAGVLEARGHNVTVIDPVEKLLAVGHYLESTVDIAESTRRIAASRIPADHMVLMAGFTAGNEKGELVVLGRNGSDYSAAVLAACLRADCCEIWTDVDGVYTCDPRQVPDARLLKSMSYQEAMELSYFGAKVLHPRTITPIAQFQIPCLIKNTGNPQAPGTLIGASRDEDELPVKGISNLNNMAMFSVSGPGMKGMVGMAARVFAAMSRARISVVLITQSSSEYSISFCVPQSDCVRAERAMQEEFYLELKEGLLEPLAVTERLAIISVVGDGMRTLRGISAKFFAALARANINIVAIAQGSSERSISVVVNNDDATTGVRVTHQMLFNTDQVIEVFVIGVGGVGGALLEQLKRQQSWLKNKHIDLRVCGVANSKALLTNVHGLNLENWQEELAQAKEPFNLGRLIRLVKEYHLLNPVIVDCTSSQAVADQYADFLREGFHVVTPNKKANTSSMDYYHQLRYAAEKSRRKFLYDTNVGAGLPVIENLQNLLNAGDELMKFSGILPGSLSYIFGKLDEGMSFSEATTLAREMGYTEPDPRDDLSGMDVARKLLILARETGRELELADIEIEPVLPAEFNAEGDVAAFMANLSQLDDLFAARVAKARDEGKVLRYVGNIDEDGVCRVKIAEVDGNDPLFKVKNGENALAFYSHYYQPLPLVLRGYGAGNDVTAAGVFADLLRTLSWKLGV

SEQ ID NO: 305 - protein, 820 aa, Escherichia coli
MRVLKFGGTSVANAERFLRVADILESNARQGQVATVLSAPAKITNHLVAMIEKTISGQDALPNISDAERIFAELLTGLAAAQPGFPLAQLKTFVDQEFAQIKHVLHGISLLGQCPDSINAALICRGEKMSIAIMAGVLEARGHNVTVIDPVEKLLAVGHYLESTVDIAESTRRIAASRIPADHMVLMAGFTAGNEKGELVVLGRNGSDYSAAVLAACLRADCCEIWTDVDGVYTCDPRQVPDARLLKSMSYQEAMELSYFGAKVLHPRTITPIAQFQIPCLIKNTGNPQAPGTLIGASRDEDELPVKGISNLNNMAMFSVSGPGMKGMVGMAARVFAAMSRARISVVLITQSSSEYSISFCVPQSDCVRAERAMQEEFYLELKEGLLEPLAVTERLAIISVVGDGMRTLRGISAKFFAALARANINIVAIAQGSSERSISVVVNNDDATTGVRVTHQMLFNTDQVIEVFVIGVGGVGGALLEQLKRQQSWLKNKHIDLRVCGVANDKALLTNVHGLNLENWQEELAQAKEPFNLGRLIRLVKEYHLLNPVIVDCTSSQAVADQYADFLREGFHVVTPNKKANTSSMDYYHQLRYAAEKSRRKFLYDTNVGAGLPVIENLQNLLNAGDELMKFSGILSGSLSYIFGKLDEGMSFSEATTLAREMGYTEPDPRDDLSGMDVARKLLILARETGRELELADIEIEPVLPAEFNAEGDVAAFMANLSQLDDLFAARVAKARDEGKVLRYVGNIDEDGVCRVKIAEVDGNDPLFKVKNGENALAFYSHYYQPLPLVLRGYGAGNDVTAAGVFADLLRTLSWKLGV

SEQ ID NO: 306 - protein, 820 aa, Escherichia coli
MRVLKFGGTSVANAERFLRVADILESNARQGQVATVLSAPAKITNHLVAMIEKTISGQDALPNISDAERIFAELLTGLAAAQPGFPLAQLKTFVDQEFAQIKHVLHGISLLGQCPDSINAALICRGEKMSIAIMAGVLEARGHNVTVIDPVEKLLAVGHYLESTVDIAESTRRIAASRIPADHMVLMAGFTAGNEKGELVVLGRNGSDYSAAVLAACLRADCCEIWTDVDGVYTCDPRQVPDARLLKSMSYQEAMELSYFGAKVLHPRTITPIAQFQIPCLIKNTGNPQAPGTLIGASRDEDELPVKGISNLNNMAMFSVSGPGMKGMVGMAARVFAAMSRARISVVLITQSSSEYSISFCVPQSDCVRAERAMQEEFYLELKEGLLEPLAVTERLAIISVVGDGMRTLRGISAKFFAALARANINIVAIAQGSSERSISVVVNNDDATTGVRVTHQMLFNTDQVIEVFVIGVGGVGGALLEQLKRQQSWLKNKHIDLRVCGVANSKALLTNVHGLNLENWQEELAQAKEPFNLGRLIRLVKEYHLLNPVIVDCTSSQAVADQYADFLREGFHVVTPNKKANTSSMDYYHQLRYAAEKSRRKFLYDTNVGAGLPVIENLQNLLNAGDELMKFSGILSGSLSYIFGKLDEGMSFSEATTLAREMGYTEPDPRDDLSGMDVAHKLLILARETGRELELADIEIEPVLPAEFNAEGDVAAFMANLSQLDDLFAARVAKARDEGKVLRYVGNIDEDGVCRVKIAEVDGNDPLFKVKNGENALAFYSHYYQPLPLVLRGYGAGNDVTAAGVFADLLRTLSWKLGV

SEQ ID NO: 307 - protein, 820 aa, Escherichia coli
MRVLKFGGTSVANAERFLRVADILESNARQGQVATVLSAPAKITNHLVAMIEKTISGQDALPNISDAERIFAELLTGLAAAQPGFPLAQLKTFVDQEFAQIKHVLHGISLLGQCPDSINAALICRGEKMSIAIMAGVLEARGHNVTVIDPVEKLLAVGHYLESTVDIAESTRRIAASRIPADHMVLMAGFTAGNEKGELVVLGRNGSDYSAAVLAACLRADCCEIWTDVDGVYTCDPRQVPDARLLKSMSYQEAMELSYFGAKVLHPRTITPIAQFQIPCLIKNTGNPQAPGTLIGASRDEDELPVKGISNLNNMAMFSVSGPGMKGMVGMAARVFAAMSRARISVVLITQSSSEYSISFCVPQSDCVRAERAMQEEFYLELKEGLLEPLAVTERLAIISVVGDGMRTLRGISAKFFAALARANINIVAIAQGSSERSISVVVNNDDATTGVRVTHQMLFNTDQVIEVFVIGVGGVGGALLEQLKRQQSWLKNKHIDLRVCGVANSKALLTNVHGLNLENWQEELAQAKEPFNLGRLIRLVKEYHLLNPVIVDCTSSQAVADQYADFLREGFHVVTPNKKANTSSMDYYHQLRYAAEKSRRKFLYDTNVGAGLPVIENLQNLLNAGDELMKFSGILSGSLSYIFGKLDEGMSFSEATTLAREMGYTEPDPRDNLSGMDVARKLLILARETGRELELADIEIEPVLPAEFNAEGDVAAFMANLSQLDDLFAARVAKARDEGKVLRYVGNIDEDGVCRVKIAEVDGNDPLFKVKNGENALAFYSHYYQPLPLVLRGYGAGNDVTAAGVFADLLRTLSWKLGV

SEQ ID NO: 308 - protein, 820 aa, Escherichia coli
MRVLKFGGTSVANAERFLRVADILESNARQGQVATVLSAPAKITNHLVAMIEKTISGQDALPNISDAERIFAELLTGLAAAQPGFPLAQLKTFVDQEFAQIKHVLHGISLLGQCPDSINAALICRGEKMSIAIMAGVLEARGHNVTVIDPVEKLLAVGHYLESTVDIAESTRRIAASRIPADHMVLMAGFTAGNEKGELVVLGRNGSDYSAAVLAACLRADCCEIWTDVDGVYTCDPRQVPDARLLKSMSYQEAMELSYFGAKVLHPRTITPIAQFQIPCLIKNTGNPQAPGTLIGASRDEDELPVKGISNLNNMAMFSVSGPGMKGMVGMAARVFAAMSRARISVVLITQSSSEYSISFCVPQSDCVRAERAMQEEFYLELKEGLLEPLAVTERLAIISVVGDGMRTLRGISAKFFAALARANINIVAIAQGSSERSISVVVNNDDATTGVRVTHQMLFNTDQVIEVFVIGVGGVGGALLEQLKRQQSWLKNKHIDLRVCGVANSKALLTNVHGLNLENWQEELAQAKEPFNLGRLIRLVKEYHLLNPVIVDCTSSQAVADQYADFLREGFHVVTPNKKANTSSMDYYHQRRYAAEKSRRKFLYDTNVGAGLPVIENLQNLLNAGDELMKFSGILSGSLSYIFGKLDEGMSFSEATTLAREMGYTEPDPRDDLSGMDVARKLLILARETGRELELADIEIEPVLPAEFNAEGDVAAFMANLSQLDDLFAARVAKARDEGKVLRYVGNIDEDGVCRVKIAEVDGNDPLFKVKNGENALAFYSHYYQPLPLVLRGYGAGNDVTAAGVFADLLRTLSWKLGV

SEQ ID NO: 309 - protein, 820 aa, Escherichia coli
MRVLKFGGTSVANAERFLRVADILESNARQGQVATVLSAPAKITNHLVAMIEKTISGQDALPNISDAERIFAELLTGLAAAQPGFPLAQLKTFVDQEFAQIKHVLHGISLLGQCPDSINAALICRGEKMSIAIMAGVLEARGHNVTVIDPVEKLLAVGHYLESTVDIAESTRRIAASRIPADHMVLMAGFTAGNEKGELVVLGRNGSDYSAAVLAACLRADCCEIWTDVDGVYTCDPRQVPDARLLKSMSYQEAMELSYFGAKVLHPRTITPIAQFQIPCLIKNTGNPQAPGTLIGASRDEDELPVKGISNLNNMAMFSVSGPGMKGMVGMAARVFAAMSRARISVVLITQSSSEYSISFCVPQSDCVRAERAMQEEFYLELKEGLLEPLAVTERLAIISVVGDGMRTLRGISAKFFAALARANINIVAIAQGSSERSISVVVNNDDATTGVRVTHQMLFNTDQVIEVFVIGVGGVSGALLEQLKRQQSWLKNKHIDLRVCGVANSKALLTNVHGLNLENWQEELAQAKEPFNLGRLIRLVKEYHLLNPVIVDCTSSQAVADQYADFLREGFHVVTPNKKANTSSMDYYHQLRYAAEKSRRKFLYDTNVGAGLPVIENLQNLLNAGDELMKFSGILSGSLSYIFGKLDEGMSFSEATTLAREMGYTEPDPRDDLSGMDVARKLLILARETGRELELADIEIEPVLPAEFNAEGDVAAFMANLSQLDDLFAARVAKARDEGKVLRYVGNIDEDGVCRVKIAEVDGNDPLFKVKNGENALAFYSHYYQPLPLVLRGYGAGNDVTAAGVFADLLRTLSWKLGV

SEQ ID NO: 310 - protein, 820 aa, Escherichia coli
MRVLKFGGTSVANAERFLRVADILESNARQGQVATVLSAPAKITNHLVAMIEKTISGQDALPNISDAERIFAELLTGLAAAQPGFPLAQLKTFVDQEFAQIKHVLHGISLLGQCPDSINAALICRGEKMSIAIMAGVLEARGHNVTVIDPVEKLLAVGHYLESTVDIAESTRRIAASRIPADHMVLMAGFTAGNEKGELVVLGRNGSDYSAAVLAACLRADCCEIWTDVDGVYTCDPRQVPDARLLKSMSYQEAMELSYFGAKVLHPRTITPIAQFQIPCLIKNTGNPQAPGTLIGASRDEDELPVKGISNLNNMAMFSVSGPGMKGMVGMAARVFAAMSRARISVVLITQSSSEYSISFCVPQSDCVRAERAMQEEFYLELKEGLLEPLAVTERLAIISVVGDGMRTLRGISAKFFAALARANINIVAIAQGSSERSISVVVNNDDATTGVRVTHQMLFNTDQVIEVFVIGVGGVGGALLEQLKRQQSWLKNKHIDLRVCGVANSKALLTNVHGLNLENWQEELAQAKEPFNLGRLIRLVKEYHLLNPVIVDCTSSQAVADQYADFLREGFHVVTPNKKANTSSMDYYHQLRYAAEKSRRKFLYDTNVGAGLPVIENLQNLLNAGDELMKFSGILSGSLSYIFGKLDEGMSFSEATTLAREMGYTEPDPRDDLSGMDVARKLLILRRETGRELELADIEIEPVLPAEFNAEGDVAAFMANLSQLDDLFAARVAKARDEGKVLRYVGNIDEDGVCRVKIAEVDGNDPLFKVKNGENALAFYSHYYQPLPLVLRGYGAGNDVTAAGVFADLLRTLSWKLGV

SEQ ID NO: 311 - protein, 820 aa, Escherichia coli
MRVLKFGGTSVANAERFLRVADILESNARQGQVATVLSAPAKITNHLVAMIEKTISGQDALPNISDAERIFAELLTGLAAAQPHFPLAQLKTFVDQEFAQIKHVLHGISLLGQCPDSINAALICRGEKMSIAIMAGVLEARGHNVTVIDPVEKLLAVGHYLESTVDIAESTRRIAASRIPADHMVLMAGFTAGNEKGELVVLGRNGSDYSAAVLAACLRADCCEIWTDVDGVYTCDPRQVPDARLLKSMSYQEAMELSYFGAKVLHPRTITPIAQFQIPCLIKNTGNPQAPGTLIGASRDEDELPVKGISNLNNMAMFSVSGPGMKGMVGMAARVFAAMSRARISVVLITQSSSEYSISFCVPQSDCVRAERAMQEEFYLELKEGLLEPLAVTERLAIISVVGDGMRTLRGISAKFFAALARANINIVAIAQGSSERSISVVVNNDDATTGVRVTHQMLFNTDQVIEVFVIGVGGVGGALLEQLKRQQSWLKNKHIDLRVCGVANSKALLTNVHGLNLENWQEELAQAKEPFNLGRLIRLVKEYHLLNPVIVDCTSSQAVADQYADFLREGFHVVTPNKKANTSSMDYYHQLRYAAEKSRRKFLYDTNVGAGLPVIENLQNLLNAGDELMKFSGILSGSLSYIFGKLDEGMSFSEATTLAREMGYTEPDPRDDLSGMDVARKLLILARETGRELELADIEIEPVLPAEFNAEGDVAAFMANLSQLDDLFAARVAKARDEGKVLRYVGNIDEDGVCRVKIAEVDGNDPLFKVKNGENALAFYSHYYQPLPLVLRGYGAGNDVTAAGVFADLLRTLSWKLGV

SEQ ID NO: 312 - protein, 820 aa, Escherichia coli
MRVLKFGGTSVANAERFLRVADILESNARQGQVATVLSAPAKITNHLVAMIEKTISGQDALPNISDAERIFAELLTGLAAAQPGFPLAQLKTFVDQEFAQIKHVLHGISLLGQCPDSINAALICRGEKMSIAIMAGVLEARGHNVTVIDPVEKLLAVGHYLESTVDIAESTRRIAASRIPADHMVLMAGFTAGNEKGELVVLGRNGSDYSAAVLAACLRADCCEIWTDVDGVYTCDPRQVPDARLLKSMSYQEAMELSYFGAKVLHPRTITPIAQFQIPCLIKNTGNPQAPGTLIGASRDEDELPVKGISNLNNMAMFSVSGPGMKGMVGMAARVFAAMSRARISVVLITQSSSEYSISFCVPQSDCVRAERAMQEEFYLELKEGLLEPLAVTERLAIISVVGDGMRTLRGISAKFFAALARANINIVAIAQGSSERSISVVVNNDDATTGVRVTHQMLFNTDQVIEVFVIGVGGVGGALLEQLKRQQSWLKNKHIDLRVCGVANSKALLTNVHGLNLENWQEELAQAKEPFNLGRLIRLVKEYHLLNPVIVDCTSSQAVADQYADFLREGFHVVTPNKKANTSSMDYYHQLRYAAEKSRRKFLYDTNVGAGLPVIENLQNLLNAGDELMKFSGILSGSLSYIFGKLDEGMSFSEATTLAREMGYTEPDPRDDLSGMDVARKLLILARETGRELELADIEIEPVLPAEFNAEGDVAAFMANLSQLDDLFAARVAKARDEGKVLRYVGNIDEDGVCRVKIAEVDGNPPLFKVKNGENALAFYSHYYQPLPLVLRGYGAGNDVTAAGVFADLLRTLSWKLGV

SEQ ID NO: 313 - protein, 820 aa, Escherichia coli
MRVLKFGGTSVANAERFLRVADILESNARQGQVATVLSAPAKITNHLVAMIEKTISGQDALPNISDAERIFAELLTGLAAAQPGFPLAQLKTFVDQEFAQIKHVLHGISLLGQCPDSINAALICRGEKMSIAIMAGVLEARGHNVTVIDPVEKLLAVGHYLESTVDIAESTRRIAASRIPADHMVLMAGFTAGNEKGELVVLGRNGSDYSAAVLAACLRADCCEIWTDVDGVYTCDPRQVPDARLLKSMSYQEAMELSYFGAKVLHPRTITPIAQFQIPCLIKNTGNPQAPGTLIGASRDEDELPVKGISNLNNMAMFSVSGPGMKGMVGMAARVFAAMSRARISVVLITQSSSEYSISFCVPQSDCVRAERAMQEEFYLELKEGLLEPLAVTERLAIISVVGDGMRTLRGISAKFFAALARANINIVAIAQGSSERSISVVVNNDDATTGVRVTHQMLFNTDQVIEVFVIGVGGVGGALLEQLKRQQSWLKNKHIDLRVCGVANSKALLTNVHGLNLENWQEELAQAKEPFNLGRLIRLVKEYHLLNPVIVDCTSSQAVADQYADFLREGFHVVTPNKKANTSSMDYYHQGRYAAEKSRRKFLYDTNVGAGLPVIENLQNLLNAGDELMKFSGILSGSLSYIFGKLDEGMSFSEATTLAREMGYTEPDPRDDLSGMDVARKLLILARETGRELELADIEIEPVLPAEFNAEGDVAAFMANLSQLDDLFAARVAKARDEGKVLRYVGNIDEDGVCRVKIAEVDGNDPLFKVKNGENALAFYSHYYQPLPLVLRGYGAGNDVTAAGVFADLLRTLSWKLGV

SEQ ID NO: 314 - protein, 820 aa, Escherichia coli
MRVLKFGGTSVANAERFLRVADILESNARQGQVATVLSAPAKITNHLVAMIEKTISGQDALPNISDAERIFAELLTGLAAAQPGFPLAQLKTFVDQEFAQIKHVLHGISLLGQCPDSINAALICRGEKMSIAIMAGVLEARGHNVTVIDPVEKLLAVGHYLESTVDIAESTRRIAASRIPADHMVLMAGFTAGNEKGELVVLGRNGSDYSAAVLAACLRADCCEIWTDVDGVYTCDPRQVPDARLLKSMSYQEAMELSYFGAKVLHPRTITPIAQFQIPCLIKNTGNPQAPGTLIGASRDEDELPVKGISNLNNMAMFSVSGPGMKGMVGMAARVFAAMSRARISVVLITQSSSEYSISFCVPQSDCVRAERAMQEEFYLELKEGLLEPLAVTERLAIISVVGDGMRTLRGISAKFFAALARANINIVAIAQGSSERSISVVVNNDDATTGVRVTHQMLFNTDQVIEVFVIGVGGVGGALLEQLKRQQSWLKNKHIDLRVCGVANSKALLTNVHGLNLENWQEELAQAKEPFNLGRLIRLVKEYHLLNPVIVDCTSSQAVADQYADFLREGFHVVTPNKKANTSSMDYYHQLRYAAEKSRRKFLYDTNVGAGLPVIENLQNLLNAGDELMKFSGILSGSLSYIFGKLDEGMSFSEATTLAREMGYTEPDPRDDLSGMDVARKLLILARETGRELELADIEIEPVLPAEFNAEGDVAAFMANLSQLDDLFAARVAKARDEGKVLRYVGNIDEDGVCRVKIAEVDGNDLLFKVKNGENALAFYSHYYQPLPLVLRGYGAGNDVTAAGVFADLLRTLSWKLGV

SEQ ID NO: 315 - protein, 820 aa, Escherichia coli
MRVLKFGGTSVANAERFLRVADILESNARQGQVATVLSAPAKITNHLVAMIEKTISGQDALPNISDAERIFAELLTGLAAAQPGFPLAQLKTFVDQEFAQIKHVLHGISLLGQCPDSINAALICRGEKMSIAIMAGVLEARGHNVTVIDPVEKLLAVGHYLESTVDIAESTRRIAASRIPADHMVLMAGFTAGNEKGELVVLGRNGSDYSAAVLAACLRADCCEIWTDVDGVYTCDPRQVPDARLLKSMSYQEAMELSYFGAKVLHPRTITPIAQFQIPCLIKNTGNPQAPGTLIGASRDEDELPVKGISNLNNMAMFSVSGPGMKGMVGMAARVFAAMSRARISVVLITQSSSEYSISFCVPQSDCVRAERAMQEEFYLELKEGLLEPLAVTERLAIISVVGDGMRTLRGISAKFFAALARANINIVAIAQGSSERSISVVVNNDDATTGVRVTHQMLFNTDQVIEVFVIGVGGVGGALLEQLKRQQSWLKNKHIDLRVCGVANSKALLTNVHGLNLENWQEELAQAKEPFNLGRLIRLVKEYHLLNPVIVDCTSSQAVADQYADFLREGFHVVTPNKKANTSSMDYYHQLRYAAEKSRRKFLYDTNVGAGLPVIENLQNLLNAGDELMKFSGILSGSLSYIFGKLDEGMSFSEATTLAREMGYTEPDPRDDLSGMDVARKLLILARETGRELELADIEIEPVLPAEFNAEGDVAAFMANLSQLDDLFAARVAKARDEGKVLRYVGNIDEDGVCRVKIAEVDGNDPLFKVKNGENALAFYSHYHQPLPLVLRGYGAGNDVTAAGVFADLLRTLSWKLGV

SEQ ID NO: 316 - protein, 820 aa, Escherichia coli
MRVLKFGGTSVANAERFLRVADILESNARQGQVATVLSAPAKITNHLVAMIEKTISGQDALPNISDAERIFAELLTGLAAAQPGFPLAQLKTFVDQEFAQIKHVLHGISLLGQCPDSINAALICRGEKMSIAIMAGVLEARGHNVTVIDPVEKLLAVGHYLESTVDIAESTRRIAASRIPADHMVLMAGFTAGNEKGELVVLGRNGSDYSAAVLAACLRADCCEIWTDVDGVYTCDPRQVPDARLLKSMSYQEAMELSYFGAKVLHPRTITPIAQFQIPCLIKNTGNPQAPGTLIGASRDEDELPVKGISNLNNMAMFSVSGPGMKGMVGMAARVFAAMSRARISVVLITQSSSEYSISFCVPQSDCVRAERAMQEEFYLELKEGLLEPLAVTERLAIISVVGDGMRTLRGISAKFFAALARANINIVAIAQGSSERSISVVVNNDDATTGVRVTHQMLFNTDQVIEVFVIGVGGVGGALLEQLKRQQSWLKNKHIDLRVCGVANSKALLTNVHGLNLENWQEELAQAKEPFNLGRLIRLVKEYHLLNPVIVDCTSSQAVADQYADFLREGFHVVTPNKKANTSSMDYYHQLRYAAEKSRRKFLYDTNVGAGLPVEENLQNLLNAGDELMKFSGILSGSLSYIFGKLDEGMSFSEATTLAREMGYTEPDPRDDLSGMDVARKLLILARETGRELELADIEIEPVLPAEFNAEGDVAAFMANLSQLDDLFAARVAKARDEGKVLRYVGNIDEDGVCRVKIAEVDGNDPLFKVKNGENALAFYSHYYQPLPLVLRGYGAGNDVTAAGVFADLLRTLSWKLGV

SEQ ID NO: 317 - protein, 820 aa, Escherichia coli
MRVLKFGGTSVANAERFLRVADILESNARQGQVATVLSAPAKITNHLVAMIEKTISGQDALPNISDAERIFAELLTGLAAAQPGFPLAQLKTFVDQEFAQIKHVLHGISLLGQCPDSINAALICRGEKMSIAIMAGVLEARGHNVTVIDPVEKLLAVGHYLESTVDIAESTRRIAASRIPADHMVLMAGFTAGNEKGELVVLGRNGSDYSAAVLAACLRADCCEIWTDVDGVYTCDPRQVPDARLLKSMSYQEAMELSYFGAKVLHPRTITPIAQFQIPCLIKNTGNPQAPGTLIGASRDEDELPVKGISNLNNMAMFSVSGPGMKGMVGMAARVFAAMSRARISVVLITQSSSEYSISFCVPQSDCVRAERAMQEEFYLELKEGLLEPLAVTERLAIISVVGDGMRTLRGISAKFFAALARANINIVAIAQGSSERSISVVVNNDDATTGVRVTHQMLFNTDQVIEVFVIGVGGVGGALLEQLKRQQSWLKNKHIDLRVCGVANSKALLTNVHGLNLENWQEELAQAKEPFNLGRLIRLVKEYHLLNPVIVDCTSSQAVADQYADFLREGFHVVTPNKKANTSSMDYYHQLRYAAEKSRRKFLYDTNVGAGLPVIENLQNLLNAGDELMKFSGILSGSLSYIFGKLDEGMSFSEATTLAREMGYTEPDPRDDLSGMDVARKLLILARETGRELELADIEIEPVLPAEFNAEGDVAAFMANLSQLDDLFAARVAKARDEGKVLRYVGNIDEDGVCRVKIAEVDGNDPLFKVKNGENALAFYSHYYQPLPLVLRGYGAGNDVTAAGVFPDLLRTLSWKLGV

SEQ ID NO: 318 - protein, 820 aa, Escherichia coli
MRVLKFGGTSVANAERFLRVADILESNARQGQVATVLSAPAKITNHLVAMIEKTISGQDALPNISDAERIFAELLTGLAAAQPGFPLAQLKTFVDQEFAQIKHVLHGISLLGQCPDSINAALICRGEKMSIAIMAGVLEARGHNVTVIDPVEKLLAVGHYLESTVDIAESTRRIAASRIPADHMVLMAGFTAGNEKGELVVLGRNGSDYSAAVLAACLRADCCEIWTDVDGVYTCDPRQVPDARLLKSMSYQEAMELSYFGAKVLHPRTITPIAQFQIPCLIKNTGNPQAPGTLIGASRDEDELPVKGISNLNNMAMFSVSGPGMKGMVGMAARVFAAMSRARISVVLITQSSSEYSISFCVPQSDCVRAERAMQEEFYLELKEGLLEPLAVTERLAIISVVGDGMRTLRGISAKFFAALARANINIVAIAQGSSERSISVVVNNDDATTGVRVTHQMLFNTDQVIEVFVIGVGGVGGALLEQLKRQQSWLKNKHIDLRVCGVANSKALLTNVHGLNLENWQEELAQAKEPFNLGRLIRLVKEYHLLNPVIVDCTSSQAVADQYADFLREGFHVVTPNKKANTSSMDYYHQLRYAAEKSRRKFLYDTNVGAGLPVIENLQNLLNAGDELMKFSGILSGSLSYIFGKLDEGMSFSEATTLAREMGYTEPDPRDDLSGMDVARKLLILARETGRELELADIEIEPVLPAEFNAEGDVAAFMANLSQLDDLFAARVAKARDEGKVLRYVGNIDEDGVCRVKIAEVDGNDPLFKVKNGENALAFYSHYYQWLPLVLRGYGAGNDVTAAGVFADLLRTLSWKLGV

SEQ ID NO: 319 - protein, 820 aa, Escherichia coli
MRVLKFGGTSVANAERFLRVADILESNARQGQVATVLSAPAKITNHLVAMIEKTISGQDALPNISDAERIFAELLTGLAAAQPGFPLAQLKTFVDQEFAQIKHVLHGISLLGQCPDSINAALICRGEKMSIAIMAGVLEARGHNVTVIDPVEKLLAVGHYLESTVDIAESTRRIAASRIPADHMVLMAGFTAGNEKGELVVLGRNGSDYSAAVLAACLRADCCEIWTDVDGVYTCDPRQVPDARLLKSMSYQEAMELSYFGAKVLHPRTITPIAQFQIPCLIKNTGNPQAPGTLIGASRDEDELPVKGISNLNNMAMFSVSGPGMKGMVGMAARVFAAMSRARISVVLITQSSSEYSISFCVPQSDCVRAERAMQEEFYLELKEGLLEPLAVTERLAIISVVGDGMRTLRGISAKFFAALARANINIVAIAQGSSERSISVVVNNDDATTGVRVTHQMLFNTDQVIEVFVIGVGGVGGALLEQLKRQQSWLKNKHIDLRVCGVANSKALLTNVHGLNLENWQEELAQAKEPFNLGRLIRLVKEYHLLNPVIVDCTSSQAVADQYADFLREGFHVVTPNKKANTSSMDYYHQLRYAAEKSRRKFLYDTNVGAGLPVIENLQNLLNAGDELMKFSGILSGSLSYIFGKLDEGMSFSEATTLAREMGYTEPDPRDDLSIMDVARKLLILARETGRELELADIEIEPVLPAEFNAEGDVAAFMANLSQLDDLFAARVAKARDEGKVLRYVGNIDEDGVCRVKIAEVDGNDPLFKVKNGENALAFYSHYYQPLPLVLRGYGAGNDVTAAGVFADLLRTLSWKLGV

SEQ ID NO: 320 - protein, 820 aa, Escherichia coli
MRVLKFGGTSVANAERFLRVADILESNARQGQVATVLSAPAKITNHLVAMIEKTISGQDALPNISDAERIFAELLTGLAAAQPGFPLAQLKTFVDQEFAQIKHVLHGISLLGQCPDSINAALICRGEKMSIAIMAGVLEARGHNVTVIDPVEKLLAVGHYLESTVDIAESTRRIAASRIPADHMVLMAGFTAGNEKGELVVLGRNGSDYSAAVLAACLRADCCEIWTDVDGVYTCDPRQVPDARLLKSMSYQEAMELSYFGAKVLHPRTITPIAQFQIPCLIKNTGNPQAPGTLIGASRDEDELPVKGISNLNNMAMFSVSGPGMKGMVGMAARVFAAMSRARISVVLITQSSSEYSISFCVPQSDCVRAERAMQEEFYLELKEGLLEPLAVTERLAIISVVGDGMRTLRGISAKFFAALARANINIVAIAQGSSERSISVVVNNDDATTGVRVTHQMLFNTDQVIEVFVIGVGGVGGALLEQLKRQQSWLKNKHIDLRVCGVANSKALLTNVHGLNLENWQEELAQAKEPFNLGRLIRLVKEYHLLNPVIVDCTSSQAVADQYADFLREGFHVVTPNKKANTSSMDYYHQLRYAAEKSRRKFLYDTNVGAGLPVIENLQNLLNAGDELMKFSGILSGSLSYIFGKLDEGMSFSEATTLAREMGYTEPDPRDDLSGMDVARKLLILARETGRELELADIEIEPVLPAEFNAEGDVAAFMANLSQLDDLFAARVAKARDEGKVLRYVGNIDEDGVCRVKIAEVDGNDPLFKVKNNENALAFYSHYYQPLPLVLRGYGAGNDVTAAGVFADLLRTLSWKLGV

SEQ ID NO: 321 - protein, 820 aa, Escherichia coli
MRVLKFGGTSVANAERFLRVADILESNARQGQVATVLSAPAKITNHLVAMIEKTISGQDALPNISDAERIFAELLTGLAAAQPGFPLAQLKTFVDQEFAQIKHVLHGISLLGQCPDSINAALICRGEKMSIAIMAGVLEARGHNVTVIDPVEKLLAVGHYLESTVDIAESTRRIAASRIPADHMVLMAGFTAGNEKGELVVLGRNGSDYSAAVLAACLRADCCEIWTDVDGVYTCDPRQVPDARLLKSMSYQEAMELSYFGAKVLHPRTITPIAQFQIPCLIKNTGNPQAPGTLIGASRDEDELPVKGISNLNNMAMFSVSGPGMKGMVGMAARVFAAMSRARISVVLITQSSSEYSISFCVPQSDCVRAERAMQEEFYLELKEGLLEPLAVTERLAIISVVGDGMRTLRGISAKFFAALARANINIVAIAQGSSERSISVVVNNDDATTGVRVTHQMLFNTDQVIEVFVIGVGGVGGALLEQLKRQQSWLKNKHIDLRVCGVANIKALLTNVHGLNLENWQEELAQAKEPFNLGRLIRLVKEYHLLNPVIVDCTSSQAVADQYADFLREGFHVVTPNKKANTSSMDYYHQLRYAAEKSRRKFLYDTNVGAGLPVIENLQNLLNAGDELMKFSGILSGSLSYIFGKLDEGMSFSEATTLAREMGYTEPDPRDDLSGMDVARKLLILARETGRELELADIEIEPVLPAEFNAEGDVAAFMANLSQLDDLFAARVAKARDEGKVLRYVGNIDEDGVCRVKIAEVDGNDPLFKVKNGENALAFYSHYYQPLPLVLRGYGAGNDVTAAGVFADLLRTLSWKLGV

SEQ ID NO: 322 - protein, 820 aa, Escherichia coli
MRVLKFGGTSVANAERFLRVADILESNARQGQVATVLSAPAKITNHLVAMIEKTISGQDALPNISDAERIFAELLTGLAAAQPGFPLAQLKTFVDQEFAQIKHVLHGISLLGQCPDSINAALICRGEKMSIAIMAGVLEARGHNVTVIDPVEKLLAVGHYLESTVDIAESTRRIAASRIPADHMVLMAGFTAGNEKGELVVLGRNGSDYSAAVLAACLRADCCEIWTDVDGVYTCDPRQVPDARLLKSMSYQEAMELSYFGAKVLHPRTITPIAQFQIPCLIKNTGNPQAPGTLIGASRDEDELPVKGISNLNNMAMFSVSGPGMKGMVGMAARVFAAMSRARISVVLITQSSSEYSISFCVPQSDCVRAERAMQEEFYLELKEGLLEPLAVTERLAIISVVGDGMRTLRGISAKFFAALARANINIVAIAQGSSERSISVVVNNDDATTGVRVTHQMLFNTDQVIEVFVIGVGGVGGALLEQLKRQQSWLKNKHIDLRVCGVANSKALLTNVHGLNLENWQEELAQAKEPFNLGRLIRLVKEYHLLNPVIVDCTSSQAVADQYADFLREGFHVVTPNKKANTSSMDYYHQLRYAAEKSRRKFLYDTNVGAGLPVSENLQNLLNAGDELMKFSGILSGSLSYIFGKLDEGMSFSEATTLAREMGYTEPDPRDDLSGMDVARKLLILARETGRELELADIEIEPVLPAEFNAEGDVAAFMANLSQLDDLFAARVAKARDEGKVLRYVGNIDEDGVCRVKIAEVDGNDPLFKVKNGENALAFYSHYYQPLPLVLRGYGAGNDVTAAGVFADLLRTLSWKLGV

SEQ ID NO: 323 - protein, 820 aa, Escherichia coli
MRVLKFGGTSVANAERFLRVADILESNARQGQVATVLSAPAKITNHLVAMIEKTISGQDALPNISDAERIFAELLTGLAAAQPGFPLAQLKTFVDQEFAQIKHVLHGISLLGQCPDSINAALICRGEKMSIAIMAGVLEARGHNVTVIDPVEKLLAVGHYLESTVDIAESTRRIAASRIPADHMVLMAGFTAGNEKGELVVLGRNGSDYSAAVLAACLRADCCEIWTDVDGVYTCDPRQVPDARLLKSMSYQEAMELSYFGAKVLHPRTITPIAQFQIPCLIKNTGNPQAPGTLIGASRDEDELPVKGISNLNNMAMFSVSGPGMKGMVGMAARVFAAMSRARISVVLITQSSSEYSISFCVPQSDCVRAERAMQEEFYLELKEGLLEPLAVTERLAIISVVGDGMRTLRGISAKFFAALARANINIVAIAQGSSERSISVVVNNDDATTGVRVTHQMLFNTDQVIEVFVIGVGGVGGALLEQLKRQQSWLKNKHIDLRVCGVANSKALLTNVHGLNLENWQEELAQAKEPFNLGRLIRLVKEYHLLNPVIVDCTSSQAVADQYADFLREGFHVVTPNKKANTSSMDYYHQLRYAAEKSRRKFLYDTNVGAGLPVIENLQALLNAGDELMKFSGILSGSLSYIFGKLDEGMSFSEATTLAREMGYTEPDPRDDLSGMDVARKLLILARETGRELELADIEIEPVLPAEFNAEGDVAAFMANLSQLDDLFAARVAKARDEGKVLRYVGNIDEDGVCRVKIAEVDGNDPLFKVKNGENALAFYSHYYQPLPLVLRGYGAGNDVTAAGVFADLLRTLSWKLGV

SEQ ID NO: 324 - protein, 540 aa, Escherichia coli
MRVNNGLTPQELEAYGISDVHDIVYNPSYDLLYQEELDPSLTGYERGVLTNLGAVAVDTGIFTGRSPKDKYIVRDDTTRDTFWWADKGKGKNDNKPLSPETWQHLKGLVTRQLSGKRLFVVDAFCGANPDTRLSVRFITEVAWQAHFVKNMFIRPSDEELAGFKPDFIVMNGAKCTNPQWKEQGLNSENFVAFNLTERMQLIGGTWYGGEMKKGMFSMMNYLLPLKGIASMHCSANVGEKGDVAVFFGLSGTGKTTLSTDPKRRLIGDDEHGWDDDGVFNFEGGCYAKTIKLSKEAEPEIYNAIRRDALLENVTVREDGTIDFDDGSKTENTRVSYPIYHIDNIVKPVSKAGHATKVIFLTADAFGVLPPVSRLTADQTQYHFLSGFTAKLAGTERGITEPTPTFSACFGAAFLSLHPTQYAEVLVKRMQAAGAQAYLVNTGWNGTGKRISIKDTRAIIDAILNGSLDNAETFTLPMFNLAIPTELPGVDTKILDPRNTYASPEQWQEKAETLAKLFIDNFDKYTDTPAGASLVAAGPKL
